United States Patent Application Publication US 2026/0357256 A1 - sequence listing, part 15

SEQ ID NO: 9 - DNA, 58617616 bp, Homo sapiens (residues 30,394,323-32,565,345 of 58,617,616)
  source 1..58617616: mol_type = genomic DNA
aattgtgtgtgcaaatgggtagttaggtatctaactatgatagtgcatgtgtgggtatgtaattactagatttgcatttgcaaatgctcatttccctaaacagccctctccccactcccacttctcagctaccctcctaccccacaacacacacatacccaggtgtaggactgggccaggtgcatctcttacgtctgctcggctgcaccagaggaagctccttcttcagcgtcccttccccattctatgcaccaccatgccctccacactgagaggaagaaaccagtgacatggccctgtcttcttccatctctggtggtaattgtttgccccacctgtaaatagtacagtctggaaattacacatgagcagttgcttttctactcccagttcagcctcacctttccaagggagaatcaccatttatgaactggacttacacaatctagtgtgcaagtaagctgcacactgagctgagctcaagagaaaagttgaggtgacaccatggaggccttgatgaaggattttaggctttacctgaaaagcagtgggtaagccatcatgccatgtgaagggttgtttaaggggtcaaccccttaacactggttttggagcactggtttcggagtcttgcacatctgcttcccctttcagcttgtgagctcggttactcctgaaaataaatgtaatgtgtattcagggtttagtgtaatccttatttgcattaatgcatttgtgcttcatgtcattgtactgaatgaagttctagtcttcttagggctttcgttgtgtacaaagggacaatgcttagattaatcttaattgctaccaattttcatcttatctatggtacaagattaatgaaaagtgataaaagaaggaactgacaggacaggtagtttatgactctaaaatcagatagtctacaaacagacaaggtgtcattttgggtaccataaaggggatgtccaataactagaacatagaagtggcattttgttgttttgtttgcagtatctacagtcaaacacctaagacacacatctggtttggggtggaccagttgcagtttaacgttaaaacccagccctgctggtggatgtagaatgctggtctgaatgtgtcagagtgattggttaagaactgtgcctcctgcaggaagatgactcagggtcacccagaccttggtttatctgccaaagaagggccaccaggatgccttttctggggaggttccatatgttgcgcctaaatgtctcagtgattggattttagtggcatgttctcttctgacaacaagctttgcttctgccatgttgaaatgcaaccttaatagctgtgtacctcttcatgtggctgagtctgagaggcagcaaaagatctacctttctccataatttttgtttagtaaggactttttatcactttaatgcaagttaagctttgttttgaatataagacttatgataactaggtcagttacatttttgttttcattatgttttttaagttaataaacttgattttttaagagcagttttaggtttgcagcaaaattgagtgggaagtacaaaggctcatccccacaattcctcgctattaacatcccccactacatcagtacaattgttaccactgatgaactacattgacacgtcaatatcacccgaagtccatgtttacattagggtgcacttggcgtacattctgtgggttctgacaaatgtatcatgacatgtatccaccattgcagtatcatacagaatcttctccctgccctaaaactcctctctgctctgcctacttcattatgttgtaaaaaaaatgacttctcaccaaataacaaatgccagtcaccaaaaatcccagccttttatttaagcagagggttgattggtacctctctccatctcctgatgggataattttgcctgtagatgggaatttggaatggagaatctctttcaaataagagatcacatgatctgtgttctagagtctataaaataaccaattgaaaaggaagtgtccaacttgacttatattttctggatcaatttgactttctgggaatttggggtttacttttgcttttggcaatttctttagatttgtctcttccatccatctttctttgagaagcttgatgcagacctgccaattgttacagtgtagcagtttcagggaagagagtaaggaagtgattctaaggacaggaggagctttctacagatgtgtcctgcctccatttgctatgagagggctctctcttttttttttttttttttttgagacaaagtctctctctgtcgcccaggctggagtgccactgtagtggcatgatctcggctcactgcaacctctgccccgccgccaggttcaagtgattctcctgcctcagtctcccgagtagctgagattacaggcatgcaccaccatgcctggctaatttttgtatttttagtagagacggggtttcaccatgctggccaggctcgtctcgaactcctgacctcaggtgatctgcccgccttggcctcccaaagtgctgggattacaggcgtgaaccaccgtgcccagccaagcaggctctcttttaaagggcttcctgacctcaggccagctaggcacctccaccttcctgcaaacctcttcttacactccagctttttgctagagcccagagctcccagttggcccttccacatcctataactctatggctgcaaacctgggcacttaatacttgttagaacttgttacttcaggtcttggataatagaggctggggtgacaatggttgtggcttgagactcaggtgataggaaaagctgtacctgtccctgagtttgtgttcttaatctcatgattcgttaacagatggtgttcaatgtctaaagccacctttgcattataaatgggagaattttgctggaaagactctctctggcatgaggactctccacctagccctcatcttttgttcattttgtcaaacaaatctacatgtgttaaaattgcaaagaactaaatacacacaccacactcacagatgagtgcatgtgaaactggtgaagtctgggtaaagctggagggatgtatcaacgttagtttcctggctgtgatgccaaactatctatcattattcaggatattactattgggagaaactgggtgatgagtagacaagattcctcagttatttcttacaactgagtgtgaatctacaattatctcaagacaaaaagcttaaaaaaactcagcttttacttctttgttttatattgccatttccaccatactccttacagtttggtgttctgtggattctttactaatctgcctcgtttatttaaatgttaattggcgtctgttaatttgatttcagtactagaagccaaactcaacaataagaccccttaatgattacaaggtattagagcttggacaagggggtctgaaaagaccctcatccctacaagaaagtaaccagtgttcagaaataaataggcatgagagagatagaaggagagagagaaagagagaataccctaacagaaagaatgactgattggcaaatttaagagctcacaaaacagaccaggtctaggatgttagaaagtacaaacagaaaatagcccatgattttaaacattaattctttagtttctttttcccttttaaattttgaaataattatagattgataagaagttgcaaagatagtatggagaggtctttggttttccccattgcttgcatcttcgataactgtagtgctgcataatagcaaaagcaggaaaccaacatcactacaatgtacctggccacttctgtgtcatttgatcacgtctgtagattccgtaaccactgcctttattatgacacagaagtgctcttcaccacaagatctccctcatctacccatttccagttatatcccctccgtgccccaaccatccctagcccttggtgcctacccatctgtttaattttctcaatttgggaatgttgtataaatggaaccatatggtatatgacctttggcattggctttttctttttcttttttttttttaaattatagtttaagttatagggtacatgtgcagaatgtgcagttttgttacataggtatacacacgccatggtggtttgctgcacccatcaactcgtcacctgcatgagatatttctcctaatgctatccctcccctagcctcgcaatcccggacaggccccagtgtgtgatgttcccctccctgtgtccatgtgttctcattgttcagctcccacttatgagtgagaacatgcggtgtttggttttctgttcttctgttagtttgctgagaatgatggttttcagcttcatccatgtccctgcaaaggacatgatcatccatgtccctgcaaaggacatgaaattatccttttttatggctgcatagtattccatggtgtatatgtgccacattttctttatccagtctatcattgatgggcatttgggttggttccaagtctttgctattgtgaatagtgctgcaataaacatatgtgtgcatgtctctttatagtagaatgatttataatcctttgggtgtatatccagtagtgggattgctgggtcaaatgggatttctagttctagatccttgaggaatcgccacactgtcttccacaatgattgaactaatttacactcccaccaacagtgtaaaagcattcctatttctccacatgctctctaacgtgtgttgtttcctgactttttaatgattgccattctaactggcgtgagatggtatctcattgtggttttgatttgcatttctctgatgaccagtgatgatgagctttttttcatatgtttgtcagctgcataaatgtcttctttcgagaagtgtctgttcatatccttcacccactttttcatggggttgtttttttttcttgtaattttgtttaagttctttgtagattctgcctattagccctttgtcagatggatagattgcaaaaattttctcccattctgtaggttgcctgttcactctgatgatagtttcttttgctgtgcagaagctctttagtttaattagatcccatttgtcaattttggcttttgttgccattgcttttggtattttagacatgaagtctttgcccatgcttatgtcctgaatggtattgcctaggttttcttctaggatttttatggttttaggtcttaagtttaaatttttaatccatcttgagttaatttttgtataaggtataaggaaggagtccagtttcagttttctgcatatgtctagctagccagttttcccaacaccatttattaaataagaaatgttttttttttttttttttgagatggagttttgctctgtcacctagtcacccaggctggagtgcagtggtgtgatcttggcacactgcaatctccgcctcccgggttcaagcgattctcctgcctcagcctcccaagtagctgggattacaggcgcccaccaccatgcccagctcaattttgtatttgtggtagagacgggatttcaccatgttggttaggctggtcttgaactcctgacctcaagcagtccaccttcctaggcctcccaaactgctgggattacaggcgtgagccaccgcacccagccttggcattggctttttaaaattcagcataatgcccttgagcgccatctatgttttgcatgtattaagaattcattcctttatatttctgagtagcacctcatggcatagatgtaccacaattcatttcactattctcctattgtaggacttttttttttttccagaatttggctgttatagccaaaatttctgtgaacaatggcatacaggtttttgggtgaacgtaagtttatttttctaatataagggctcagaagtgcaattgttagatcgtatggtaagggtatgttttattttttattttttaagaaaatgtcaaagttttccagagtggctgtaccatcctacatttgtaccagcaatgcatgagagatcaggttgtttgcatcctcagcagcatttagtatcgtcattttgaacagaattttaactgttttaatcagtatgtagtgttatgttcctgaacatattttcatgtgtttatttgctattcatatctcttttttggtgaaatatctggccatgtcttttgcctgttttctaattatattatttattgagttgagttttgaggggttttgttttgttgttgagacaaggtctcactttgtcgcccaggctgcagtgcagtggtgctgtcatagctcattgcagccttcaactcctggcctcaagtgatcctcccacttcagcctcctaagtgagcagatgagactacaggtgtgagctaccatgcctggcctgagagttctttctacatattagatatgagtctttggtcagatacatggtttgcaaacattttcccctagtctgtagcttgtctttttatcttcttagcagggttttctgcagagcaaaaaatttaattttgacaaaatccaatttattaatttttccttttgtgaattttacttccggtatcatatttaagaaccatttgcccaggacctaggttcctatgatttttttcctatattatcttctaaaagtttcatagttttatgctttatatttacatttgtaatccatgttttgtgtaagatatgagatttaggtcaaggttctctttttgttgttgttgttgtttgtttatagatatccagttgttctagctccatttgctgcaaaaaactctccttccttcatggaattgcttttgcatccttgtcaaaaatcaattggccttacctgtgtggggggctacttctgagttgtccattctgttccattgatctatctattttttttcttttacgagatggagtctcactctgtcacctaggttggagctcactgtagcctggaattcctgggctccagctatcctcctgcttcagtctggtctacatatcttgatatttgagaataagaaagaaggacttcaagatccgggttagactccccatgtcccagtacctctggcctccaccaagaatggatgtgagcactggaactgggctcaccaccccagtggggtttgctctgcacaggagcacgtgtgaaggactttacccactgctttctctaccacattccccagacactactgttttgggtctcttttcatttcttttccttgcttacacatgttctcagattaaagtgggattttctgaaacagattttttctataatggggtaaaaaccgtaagtaaacagaattatcataaccatttaaatagtaataaaatatgtttttctatttctattcaaagagggggaaaggtaactggagaagatgaaaggaaaagctagatttgtgggtggtaggtgtgttttcttcttcttcaacaacaggtacagagttttagtaaaggacttcaagggaaaaggaaaaaaatagcatatactgttatggggttatttttatctttcatttttgtgacaacttatttgtacttaagagaatctttccaaagagttagaagcatcattaaataaagactgtgaaatgtgcaatatggcttatttatttaaatgttaattggtccaacgaacacttctaattagctctatatttgcttagcaaaaagttttacaaattccaattgtgaaaagcagctattttgagctggtaagcatgttgcagcctcagctatgatttttctatagttctcagcccttgaaggcacaatttaatttttcatgtatgcatactagcaacggtaaacacttgcgagtgtaaagaaccttctttaattagctgcacaacaattaaaggattcacaaactaaattgaaccctgtctcggtgcttactagctgaattctaccacctgtcacaacagcactttgttcaatctgttatgcaaaatcattatagcaatatagtggaggggaaaaaaaaagagaaaacagcaattatttcttacttttctcttgaatgggttattttgggttatactgatgtcaggttcattgaagctaaccttttgaaatctgtaacagcataatacttctaaggcagtctcagaatggctggaagaatattccattttacgcttttaggaggaagcagcattcatttctttcctcctaaaagtgctggagactctgatcatttgaaacaacctgttctacctctcccagccaccttccatttgccttttttcaccgggaaccctgtacggctcgacaggcttctgtgttttaaaagcttgcaaaccgcggccgacgtgggtttaaagatgcaattctcaaactgccgcctccagagcatctcgagtcatattacttcataagcccagtgacttactgtaaaaacatgtgtgttgcttgctttttaaacattttttaaaattaaaaaatatatatatatatatatatatatataattttcaaaaatttgatttaaactaaactgctctcctgtttagactgggtcggaggggaatgttacccccaccccaccctggccatttgcagagacaaaggctttattgtgaggcccaaacccaaagcctgacatgacagacttctccctggagtcaaggaataaatgtttacatttggtgttgccgtgccctggccccctggtaggaatgcctgcaactctgggctttcacatacagaagggatggggagggatgctttgcggaggagaacaccgctgctgacgagctgcactttgagatgctgcctggcattgcttaaaatggcatcaataacatattgttagtcccagcctccaaagcatatgtgatctggccatttcagacgtcggagtgactgtagacaaaccgctgagctcagtcagagggtctgcattctcccacattacaatattttttataagttgttctttacatcatttcaggaaaatgcacaacgcagacaaggcaggcctttgaaaatctaaactctttccctgaaaaaatgctgaaaggaggaaagtgagagccaaaggtcaaaggctgcgcaagaatgtgtttctctatttttcctatttcttaagcagaggaaactgtcatcgttgtggcatttgggtaagaaggactatctccaatcaggtccaggagggagaatttgaagtctacaggggcttctctcttctttctgctgaaatccaactctttggctggtccagggctagtgcatggaaactaaagtgagctgctatccgctttattgaagttggtgaaatgcatacctcctgcaaacttgcagctctagaaagaagacccacttgctgtcttccacagcctccctgtctgctgctgcactcggctgcagttttattgccagagtctccaagtgcaaggtccagctgctctttgtccctgggcatgctgtccccctcgttcttcctgtgctcttgacaacggtgtctgcaccaggcttttgatgggaggctgctgttgccttcagggatgggatggtcacatagtaggctctcagtgaacatctggtgatgaccgtaaatgtaatctccacttggccgaagaactcatgggaattgaagggtggattcaggcaatttaagcccttcagcattcccctctacatttttttctttcctttcctttcctcttttttttttttttttttttctgctgttcatttagaatctcctcatcacggtgcactatttgttccatcccacgtttcttattgctagtcttgcaagggaagatggtaggtagaagaactgtagcgtaaggccagcgttgcccacgcagggcctgcctaccttgtgctcagacctgggttgggcacaaagggggccatcctgccttcaagaggcttctagtctgggcgcagagcccagactccccaaggaaatgtggagacagccttggtgtagattctgtatttggggcaggccagagggggacactgttttctggcaccccagcatccctggaactccagcatcctcaactgcaggccacttgaggtagtgatggcttagcagtgaggcgcatggcatgtggagacaggcagtctggggttcagtcccagcaatctagtgatcagatgtgaaactttaggcaagttatttaacctctctgtgcctcagtttcctcaaccataaaacgaatatgatagtagtaaaactcactgatagagtttgagaattatgtgaaggcacttagaacaggactgagtgcccaggaagtaccacgttagttaccattgctgtttgtttctagaaaactctccaaccatgattttcctcttctcttatactacaaccacagtcatcaacacagaagaagacttctgtgaccaaatgtccggaggcgggggggctcctcaacacacccagcagtggacaccagctgggtgtccccaattcaattctgccaccatctacccagagatcccacaggttgcgagctcagtccccaagacggtcctgccccaggcaccagttgcaagtccaggcctcacgaacttctgaccaacaggcttcacgttggggttcccatgaccccctctttgggtcctattaatttgccggagcagctcatggaaacatttacttatgtttaccagtttattatcaacaatattacaaaggatgtgggtgaagagaggcgtaggggaatgtatggggcatggtggggagcttccacgccttccctgggcaccactgtccgggaacctcaaggcattcagctatcccgaagctcccagaacccagtcctcttgggtttttagggaagcttcatgatgtcatacatatccttcagaatatagggtgagaccctctttggggagggtcttaagaccccaagtcagaaagatgggggaagattagagtcctgccttggggcaggtgaaaggaggtcagaaaaagatcagaaatattctgtttcctgaggcctaatactgccaacattacaacaaaagactctgacagggaccatgggagttatgagccaggaactgcagacaaaacctatgtatatataataacaccgcactgctacttcctgaacttggggtctccctgtgcctgaactccataggttctgagattcaacagaaccttaggaaaccatctcctagctcctggcttcaggcttgatgggtctgatgagccatcagaccagagtcttccagggaaagcttctccatgggtaccaaaccatttaagactgcacttctcccttgcctcttgatactgtttatgggcgcagtgttgtagtctagaaggtggattttcagaaccggtgtgatcagtcgccacacccgaatcgttttccacctttgcatcctgcctactggaaattggattacttactgaagaatgtggaggcccttgatgcagaggcactgttaacatttttttttttttttgagatagagtctcactctgtatcccaggttggagtgcactggcacaatctccactcactgcaacctccacctcctgggttcaagcgattctcctgcctcagcctcccgagtagctgggattacaggcacccgccaacacacccagataatttttgtatttttcgtagagacgggatttaccatgttgtccaagctggtcttaaactcctgacctcaggagatccacccaccttggcctcccaaagtggtgggattacaggcgtgagccaccacgcccagccactgtttctatcttatcagacctgaaggatctctaaagtcaggagttcctgagtatcttccatgctagaagtatgtgcattgttccatgtgcagggcacatgggagagacacaatcattgttaacatatgaatttatagcctagcaggggcaccaagaaaagggaacaactagtcaaccgcgatgcatgcccagggagaaacaacccaaggaagaggagtgggagacgagagagcggagtgtggttaaggactaggaaaggatcaggagcaggtgccaccgagcaagaatcttaatttgccatggtcatgggttggggaaggttctgaaggtgttttctttgaaatccacaccgctttactccaggccaacagggattttggccaggagactgcaggctgatgtaggagagctctgctgttggggaaggatacattgtagggctataaatacctgagataggaaatgcgtatttttagctccaagcattgaggaaacttggattatctagcagtgattggggtcatctcccagctctgtttctacactgggaaactgtacggccagttttccttttaagggttgagcaacgtgccggggctggcacagcttggtgcctgacacagagtgacccctggagactgtctgtggaatgactgtgtgacagcctccagtgaacaagttttctgtagcgggtgtgctcctttaaagcaggggccaccacaacttgttggcatttccctgggtgttgctatcatgtcagtttctcatggtgataaccttttaaaagatgtttgatccctaaacagtgtagaaagagatgcgagcagaggagatccacagagtagacagagggcatccccaacctctgttgtctctgctttggaccctggactgactgcaatcatgtcgggtcccaccagttactttaatgaggggggattttgcttttgcagaagttgctgcctttcttgtgcctgttactttgctcacttattactggggtcacagcaggtggctggataaaggatcaccggaaccagggagccagccctacaactccactttgctcctccctgacctaccctgtcctgtgtggccaacagactgaccttatgatccccagaaggctgaaaaatctacaaaggatgtttcttcctttttgtttatattgacgttttgctagtttttctaaacattacataatgagctgatttcaaaatcagcttgctgtttcgagaaaactctccaaccatgattttcctcttctctcacactacaactatagtcatcaacatagaagaagacttctgtgaccaaatgtcagggtggggggctccccacacacccagcagtggacaccagctgggtgtcccccaattcaattctgccaccatctacccggagatcccacagggtgagagctcagtccccaagatggtcccgccccagacgacagtcacaagccggggcctcacgaacttctgaccaacaggcttcactttggggtttccaaaatcccctgtttgtgttctgagcagcaggaagggaatggacatccctgggtgatcaccaagatgagttctttgctgtctctcctttcaggcccttatgcatatatattctctctttttgttgttgtacataaagtggattatgcttgcataccattttgtgaacagccactgaatttaatgtattcttctgcacccttcttgatgagtgcaaaaacaattgcatgactctaccatgattgatttatttaatccagtcccgtgggtggaaatacagatggtttccaattttctttttctctcattagatctggggactgggctccttgtctttggctcacagaggatgactggggtttcctttgttgagaggaaagtggccgtcatgaaatcagttgggttttctctgatgtgatgggcactatgagtacctgccttggcccactcatcaccaaccctgaaggggtctcaggcatatacttttggattggaggtgggttatgagaaagatgggctgtgtttctttttgtgtgagtggatgcatgtacctgtgcacgagtacatgtgtgcacagaggtgtagaggaagttcaacctgttttttgctttgggtttgtggtgattgaatccaggccattatagaccatggggagaagggtggaaatctgggtgttgcattctagtaaaattggccactagtataattgccctaaccttctgagtgtctgctcacgggtgttaagcatttgtctgtaccatttttgattagtgcatggtatccaggggatgcccttgtgagccagcctcccctccccatcaccacctttgttccttgagcttctttccttcagtactccatctgcattatttgtccaggccacagccttttctccaggaattagaaagtcatcactgttttctactgccattcaatcttcttgacctctggtgagagttgtgagctgctctctctgccaatttcagcagctgggagggatattggtgagggcacaggaagtaagtggaagaagggtatcaaggtggtcacatcgcagttgcaatctgcttttgttttattcctttggttgttagtaattagttattcatccatccatatgtccatccatccatcagccatcattgatccatcggtccatctgtccatcatccatccatctatccttccatctattcatacatctatccttccatctattcatccatccattattctctatcatccatccatctatatattcatccatcctccatccatcgatcttctatccatccttcatctatcatcatccatctattcatctgtctattcatccattcatccatccactcatccattcatccatctatccacccacaaatccatcattcattcattcattcattatcatccattggtccatccatccatccatccatccatccatccactcattcatccatccatccactcatccatccatccatccatccacccacaaatccatcattaatccattatcatccattcgtctattcatccatccattgatccattcatccatctatccatatctttctatctaaacattcatctctggtatgtagaatggtgtctggcatagagtagttgctcaataaatatttgttgaataaatgaatgaataaataaataaaagtcagaggttttgaacttggagagtgtatttcctgccaatagtctgcagcaggcctatgagattcagaccaccttgttctgctaaaggacatctcaagcctcgctaatcttacagagctctcttttcttatgttgttatccttgggaggcgccctgtctaattttctccttccgaatccctggcccccctgctcccagcttccttggcagcagacaaggaagaagggcaatctaggtgtacttttataaatgacactttgatgaacatcatttcagctaaatctttgtacacgttcttaattatttccttaggtttaattgctagaagtggaattgccaggttaaagagaatgcacatttaaagatttgaatacctgttgccaaattgcccttcaggcatgttatgtcaaattacgtcccccgaccaccacaactgccatacaaattatgaccctgtccctttccttatattccttcaagtctgaatgttatttaacaaagtggtacaccgtactaattttatatgcaaactgtctcattttgctttttatttctcaagcttaatatgtatgtatatctatattttatgtagatatctctctatatagatgtaaagatacatatctttaatggaatgcctctaagtccctttggtgaattacctgtttatgccttctgtctggtttccttttgggtatttgaatttttttttttaactgtagcatctcttcatacatcagagatattaaccctttgtcttatacacatcttctaattgtttcttcgaagtatttcacttggaaaaatagttcgtacatggtgttttctaatgagataaagggatttaagtgattaaatcttttaatgtattcctttactttttagtgccatgctttgaaaatgatttcctaccccattaataatactcctaaattcaccttaagtatttatgattttattttaaatataaatttctaatccattaagtgcttattttgatgtatatccttagggtaaaattttgtattcacacattgcacacatattcataattttctattaaagagattttaaaattacattttccaactgatatataagatatataggaaaactccatttactttttgttctttgaaatttataaataaaataactttaaaaaattatttgaaataaataaacaatgaaaagtgaaggtctttttttttttttttttttttttttttgagacggagtctcgctctgtcgcccaggctggagtgcagtggcgcgatctcggctcactgcaagctccgcctcccgggttcacgccattctcctgcctcagcctcccgcgtagctgggactacaggcgcccgccaccacgcccggctaatttttttttgtgttttttagtagagacggggtttcaccgtgttagccaggatggtctcgatctcctgacctcgtgatccgcccgcctcggcctcccaaagtgctgggattacaggcgtgagccaccgcgcccggccaagtgaaggtctttttaaaatctctcaccttcacctcaatttcaccctcttctcaagaggtaataatttttcatggattggcattatctctgcacatgcacaaatgcatataaatacaaaggagttcttgtttttcacaaacatggcaaaaccgtatacacattgctttgacactagcatttatatacttaagaatatagagatctatttaattctcttaaacttggacaaaattccatgatatggatgtaccataactacttaggtattttccaatgggtcaatgattgaatcatttccattctttctccaattaaaaaaatgctgcaaaaaaatttctggcacatacacatgtgaatatttctataatatggatacctccaagtggcattgttaggttgaacggtatgcacatttaaaattttcgtggatattgaagaattgctttctaaacagggtgcaccagtttacttttctgcagatagtgtgtgagaatggtcagtttcccaaacctgtaccaacaatatatacaaataaagctttttagtttttttttgcaatctgatgcaccaaaattttaaaatttttatatgaatttcctttggaatatagttaaagatacatttttatttatacaactttatatggcttcattttaaaaagtctttaccaaggattataaaaaaattctcctatgatttcagtgatgacttcttagttttaaaactttttgtgtgaagtaatgttgtgtaatgtattttttaaatgcatagactattatctcaatatgtttactgatcagtctatttttatatctgaatcatcacctttatcaaaaccacgtgtcactttcgggcttctctctacctggttcattgacatatttgtctacttctgtatactaccacattatttcaattattatagttttactgtattttgatttgatagtacacatgctgtctttttattctttcttaaaacttgcttggcaattatcacattttttaatgatgaattttagatttcacttgataagtttgatagatgatcttattgataatttgacttggatttatagattaattttaaaaaaatttatgtatttatgatatcaccatttcatccatgaacatggtatagttctattcaggtcttattttatgcccttttgtaaagttttctgttttacttttatagattttgcccatgtcttattatatttattctgggtgtttgaaatttcctctgacaacttacaattgtttttttttatacaggaaagtgatcattttcagtatattgattttatctttgacattttactacgatttattagtactaacagtttcatactttattctttggatcttttaggtacagtcattttcaactgtgaataatgacagttttgcctagtccttgtaaataattacaactcataacttctttttttttccaaaaatttcacattgtttgtattgactaagacttccaggacagagtgtcttgttgctagctttaacagaaataattccaatgttttgccattaaacataatgtgtgatttggccatttatctttttataaatcaggaaggaatgttgaattttatcaagtgatcttgggatgttgttgatataatatgattattctcttgtaagatattaatatagtgaattagtagactttctattgttgaatgaatcttgaattattgggggtaaactctagttgttctttaataaattatgtgaatataccatatggttcatttcactaatattttatttgatatttatattgctgtttataaatgagattgccttatagcttctaatagaaagtagtagtaatagtagtaacagtaattcttgtccttccttttccccttctccttcttctcctctttctcctccctcccttctttctttttgtcttatatgctatatctagtagcactatcctagtctcagagaatgaaatgagaaactttctatcttttctgtgttccgagatggtttatatacagagacgatctgtttctttgaacttctggtaaactatgaacataaaagtgatgaggcttttttttaaaatgtaaatgttcgttatccttaaatttcttctatagttattcttttattcaagtatgttacttctcattgtcatatctgataatttttttagacaattcatttattttagtgtagattttcaaatttaatggtataaagttgttctgtattttatcattattttaaaatgtgttttgtatctgaatttttattcccttcctcaatcccatgttgtttgtgttttctctttttattctcatccatattgccacatttattttcttggtcttttcaaagaaactgtttttagttgtattgaatgagccttttgggggaaagggtgtggagcggttctatttaattagtgtctgctcttatttttatgaatcccttcttactttcatcaggtgtatttttattacccccctccctagtttatggaattgaaggctttgttcatttgttttcaattcttttcactttctattcattacattaaaggttataaagtctcatttgactaccctcttaaccacatcctagaatttttattcgtttgttttgctattgctttgtttttacttttaatttgaacaggtatttaataagatttataggttttggaactttattcaggtatttttgaatgctgtaatacatgtaacatttttgagatgttgcatggatgtttgtaaagaattcatattttctgttgggtatggggttctgtcattcttatttttaaacatttatttttaaagtctaatttcctatctgaggaaggcatgataaccttttccatgatgaatttgttagttttgcattacattacccgcttttgcattatgtattttatagctttgttgctaggtgcatagaagttcatcactatgattgctccttgaagttctttgatagactgtattctttcttgacataaaaattccctgtactggctgggcacggtggttcacgcctgtaatctcagcattttgggaggccgaggtgggcaaatcatgaggtcaggagttcgagaccagcctggctaacatggtgaaaccccctgtctctactaaaaatacaaaaaattagctaggcgtggcggcgggtgcctataatcccagctactcaggaggctgaggcaggagaatcacttgaatctgggaggtggaggttgcagtgagccgagatcatgccactgcactccaaccccgggcaacagtgagagactctgtctcaaaaaaaaaaaaaaaaaaaaagtttccctgtacctatttaatgttttggcctcaaattatattttatatgatactactatttcactacttacttttgttttattgatgttgctttgtatatatcttttccattcttaaattttcaacctttatgtgaaactggttctcacataaagaatataaaactggggaatggtgggcatatatttaacctaatccaatatttgaaattctttcttttttatacatgattttaacccattaacatttattaagtttactaatatgtttagtttttatttttgctatcgtttttatgttgtctgttaatcatggcatatgaagttttctctcttttattgcatggatgaaattttgtttcattttttttcttttctgatttaaaagtgtacacctggggtttggtcacataatgagaatgcttaatttctgacacattttaaatgtgtgtgtgtgtgcacatatgcattcagcatccatatcctcccttgaacaagacaaagccttatctgtcatccatcccagccccatgtcctttgcctttccttcatgtgaaaatgatctgtgattttaattccagacattgtaaaaaccattatgtactacccattatttgaacttaaatataaatataaactgacctttggtttacttattttatttcctctgttgtataaaacctttaatgatttcagagtgagtctgagtccttttttatctgaaaatgtgttattttatcttgcacttgatgctacatatagaattctaggtttaaaataacttcccccagccctttgaaaatattacctgactattttgaaatatccagtgttgtcattgagaagtctgatgacagtccaattctcattcctatgtgggtaagctgttgtcttcttcctcttctttttcttcttcttttcctcctcctcctccttcttcttcctgcttctgcttcccctcctcctcctgctctcttcctccttctccttcttcctccttctccttcttctcctcctcctccttttccttcttctcctccccctccccctgccccctgtctccctctccctccccctcctcctcttctccctccccctccccctcctcctcttctccctccccctcctcctcttctccctcccccttctcctcctcctgctcctcctcctccttcttcttcttcttcttcttctccttctccttcttcttcttcttcctcttcttcttcttcgtcctcttcctcttccttttccttcttccttcttctccttcttcttctcctccttctcttttttttccttctagcattgttttttccactttctttctggaggttggaggtctcttcttgatgtgacagtgtgtgaattcttttttccagaaattttcccatcagctgggggattctttcaaacgtaattctttttatttttctcagtctacagactgaaaaatcatcatgatcatcatcatcgtcatcgtcatcatcatcatcatcatctttttatttgtgggggacagagtcttgctctgtagcccgggctggagtgcagtggcatgatctcggctcactgcaagctcagcctcctgggttcacaccattctcctgcctcagcctcccaagtagctgggactacaggtgcccaccaccgtgcccggctaattttttgtatttttagtagagacagggtttcaccgtgttagccaggttggtctcgatctcctgacctcgtgatctgcctaccttggcctcccaaagtgctgggattataggcatgagccatcatgcccggcccatcatcatcatttttcaatccttagctcgcttgttctttctggaacttctacttgatgggtattagacactttggattgtatctgcatgtcttttcatttatctcctatactttccatttcattatttttgtactactttcacatgatctttcatgtcaggaatttggctgggaccatgtctattcagcttttagatcttcaacagggatttaaagaaaatatatgcaatcaaattgtgaatttccaacacttttttgtcttttccttctctgatggctctatttccaatcagtcctttctctctttatggttgcaatattatcctttttgtgaagatactagttagaattttttattaaattatctttgtcctctgaatttttttttttttttttttttggtacatcttggttcttctttgttgtgtttttagcttccttcacatttgtagtgagctattttgtcatttgtttttgtgaaaagaggagtagtggcttagtattggtgcctggcagatattcttctgtggttctctaggtctgttaccccatcaggctctccatggcatgggagggatgctcattggctcttactgtggagggttctgggactgtcagactcacgttaggatgtgcagtgtggggtgtgtgggcaggaaaataggcaggctgggactcacccacctcctccctgccctccccatcctccctgggaagagggcaggctttctctctggcactgggagactcaggtgctcaccttcctagtgggtggccctttcatctttttccccaccacgttgatgaggcaactttaaactctctcctgtgtctttccaggtccctgtcctcactctagaacatttttttggttaggtgattcatattcttagagtgttggataatacttggcacttggctttgaggatgatgcttccctctaccactgcactttccattttgagtttttgtggatcagctcattattttcaagttctttccccacagtgtatttgaggctgttctttggcctatgtctattgatctgatcccatctatattatttctttctttctttcttgagatggagtcttgctctgtcatccagactggagtgcagtgacacaatcttggctcactgcagcttctacctcctgggttcaaacaattctcctgccccagcctcctgaatagctgggattacaggtgcatgccaccacgccaggctaatttttgtattttttttttttttttttttttttttttagtagaaacagggtttcactatgttggccaggctggtcttgaactcctgacttcaggtgatccgcctgccttggcctcccaaagtgctgggattataagcatgagccactgtgcccggccctgatttcatttactttccatcctcaggaatatctcaacattcctggcatgccgatgacctgcttcttgtttatttagtgccattagggaattattctatgtgaaaaaaacatcttttatgccatttccagggatttgaggtggcagagaaggagggtgaatgtgtccagttttccatcttgatacaatccactgcaaatgttatttaaatttcgactttctgggttttaagatttaatggaattctctaaatacaaacataccattagaaaaaaaaggataaagttttcttatttccaatatttatagttcttatttaattttctttgctaattgcattagttagaacttccataacaatatttaagaattggggtgatggggcatctttgcatctttagtttgcttttaatttgatgaaaacgtctctagtgttttatcacaaggacatgttttgggggtcggaatttttgtttgtttttagacagggtcttgctctattgcccaggttggattgtagtggcacaatcattgctcactgcagccttgaactcctggaattaagtgatcctcccacctcagcctcccaaataggtgacatgtcactatgcccagcaatttttttttctattagtagagacaagctcttgctatgttgcctaggctcgtcttgaactcctgggctcaagcaatcctccccgcttggccttccttagtgttgggagtacaagtgtgagccaccatgcctggcttgggttgttttgatataagtatattttcatgatcttatttttgtattgccaagcattttttttttttaatcagaaacgaatacccaattttgctggaggatttttgatgtctatcaaaatgatcatgtagatttgttccctggcctattatgcttgatttttaaatcttgcatcatcatttttgacattgatggagcattcctggtgtcctgttctaaaatgaaggagacatctgtgacctactcactgtatagtttcttctcttctctggagaaggcagcctttcacaggtgaagtgcgttcagtcattcccaccgtgggtgcagcatggatgacaggaaattaacttaatgctctttgttttgttaaatctaaatgatagatgcttagtaattgttggttgaatttaacagaaatatttagacttctagggttttttgtaaaatttcaaatatctgaggagaaaaaaataaacttgtgcatccttcctcataagatgttaaatagcatctttactcacttcaattacatttttggaacacctacatgtgtactgggcattctgcctagggatctgcaaagatgggacagaggtggctcctctgaaggtggggttggccggggttggaagggtgtctatgatgatgtgcccgtctcaagaggtacccatttccttcatgccaccatcactaaaccttcacctctgggagtcattttcttccaaattatgcaattaagatacttgaattgttataatggttattattattttaaactcttatttacataattctggtgcagactagatatatggccagttaccaaaaattttcttttaaaaattaagtattaaagattggtctctgctaaatgaggatggattttcttttattttaattttcccttcagaaataactttatattttctgattagagaaacgatgcgtgtccatgaactaatttggaaaatacacaatagcattcagaagagtgttggtcctgccacccagaaataacattttgttattttttctttctttattttctatgcctatatattcttttctttttcagaattggtaccaaactgtagccatagctgtatctttcacttgaaatgttatcatgggcatgttcccatccactgaaacgtcttttgaaagcctgagttttaaggcagaacgctccttcatggctttgatgtaaccattcccttactcttgaacatttggggtgtctgagtgtttttctcactataaatagcatttccgtacagttttgtctttattgctgatagcattctaggtttgttctaggagtggaaaactgagtcatagtttataaatgtttttgagccttttgatctataatgccaaactgctttcagaaaaaatataccagttttcactccttccagtacttcctaagaatgccctttctctgtaaccagaagcatatgtcatcattacaaacacacacacatatgcgtgtgtatattcacgtgtgtgtatgtgtgcatggctaattttacaaacgataaatgttgcttcgctattttaaatcagattctacccaagacagataaaataaaggaaacgtgagttttgtataagatgagagctgaatgtgcaaatgggccagcagtgtgaggagcaggaggattggatggggtctgagaagaggcagcacgctccgtctcctgatgtgctcacatctggggaggctttggcgtgaggcttctctcaccatggctctccccatccaggcaggactcccaacacgtcctctgctccacggcatcctttccaggcacggagaagccatcagcaacccgggaagctcagtgaagaggaaaggcagcaaagcaggaggggacagagttcccatccgggtgctgcttctggaggctggaggagaggccagattgtggtggccggtcctgggatgagtcatgacccagtgcttgcaggagtcacaggcaggctgggcgctgggcagaaagggtgcagggcatctgcagggacccagcctgcatgtgacactcccagggatgtcacggggaactgcttgtgcgtggctgagaacagaatctggcttaactcttttaacaagttaatgtttgtgctcatgggccctgtgcacatttaagaattaattaaatcctttaaggaagccatttatgtttgagaccaaagaagatacttaggggccaaaatacccccaaagaagaaggcctgatcacatctcttatgtcttggaagaccccacaagaccaacttccttataccccgatccgcagtgcggtgtgtacaaatacctttaacccattctttccggaaagctcctggggaggcatattaaacctgagttattttcaatttcatctaaggtgtctctatccaatgcagtttcttcaaagtctgcaatgtgggattcaaaatctcttagcatcatcaaagtcttagaaaaatatattactaggaagtagagctgcttcttgtgtgttaattacaacaagcccggctgccgcgcagataatctctagcgtcagaagcatcagctcaggcaatatcaggaaaaacaaaatctttttacaaaagaaaatcctaaattctctttttttttgccctctgaggaaaaaaaaagtgtggttcattgtgaagttaaatcccatctatttagttgttcttataaagatttcactgatatttgaaatattcctctcttgaaagggaaaaacaaggtaggttttcaggatccagcctcagaattatggtgctattttcggagtctttatcttcagaggaaaagctgtgaatcgtccatttgggccaggttctgagtacaactagaactttagcctgcctgagacgaatgcttggtttgcatgtgtgtgttttttggtgggtttcaccgttcaccttcacttacacgctgaggttgaagttgtgcggcagacggggctcttctttcccgtggctttgagggaagtagggatctgttaccagctgtccctctgggacatctgtgctccctgaaagtagagcaggctcctaaccaagacagggtccttgggcttcggaggcagtgaaggtcagggataggtatgtagaggatccagcgtgcagagaagggagaagtcggtagattttaaaattacttttttttctttaatgaggaggaaaactccatcggttcccatttattcagaacttcttaagaagatcctaatctactgtggccttaagatccaagttggttaaaggaagagctgagtgacagcctgtcctgaccagggagaagcaagccattggtggtgcccagggcgacttcattttttttaaattttcttttttagagacagggtctcactctgtcactcaggctggagtgcagtggcacaatcagagctcactgtagcctcccagttcctggcctcctgggtagctgggattacaggcatgccaccacgcctggtaatttttaaattttttgtagagatgagagtctcaccatgttacccaagctgttctcaaatgcctggactcaagtgatcctcccacctcagcctcccaaagtactgggatttcgggcgtgagccactgtctctggcccggcaagttcagaagatacggagacccccgtgtaaaacaacctaagtcacagggtgagagatctacccttgtcacgctccctgggatctccaggagagaagccccttccagcccccagtgtgtctttaacaccttctacctctgccagcctccctctgtacacgagagcaggccccaggccagggccggctgcaggcagcagtattcagccagaatttaataacattgttctctttttatttatttttataattacctttaatttagagcaagtgatacaaatttccatttagggtaatgatatagtttccttttaaatgcattaaagtaaaaaatagtgaattaattaaaaaaatattagcaggggtacaaaaacatgggaaaaaatgtgaaggtagtttattgcagtacaactctatagcaaaaagcatcaggaaggtgatatgcgggtgcctgaaactgggagcacagatctgtaaggcccttttagactatttttattttatttattttctgaaacacgtgaggtgacccttagctactggagagtttaggattttaggaaacagggctctacagaaaacctcctgaagacaagacatattgacctaagaggtttaggatggattccaggcccaaggaagttgcatcagaaagatcccaagatagagtagcccctctcctctttagcattaatttttctagaaaggactaaagatatctccctaagtaagctaagaaccctactgcccaagaaaaaggttactagatgtcaagtaatattataatggatgctgaattttaccttttcctttctctgaattctcctgccacctccctgcaagagtatagcccatgggggtggcctactgtgttcttcctgctctcagtttgggtatcaggtcttgaccctcttcctttctagaggagacttgtccaggcttatctccacagttctcataacacctagcacatagaaggcatcatttgcccattccatctatccatccatccacacatctacccatccttctatccttctatttagcccttctctttctctctcttcctttcttcttttctctctctctccacctacccaaccatatagccatcgatccatgtatccatccaccacccacccatccctcccttcatctgcctatctacacattcatccatccatccatccaaccatccatccatccatccatccatccatccatgcgtctacccacccacccatccctcccttcatctgcctatctacacatccatccatccaactctccatccgttcaaccatccatccatccaaccaaacatccatccatccatccatccatcctcccacccacccatccctcccttcatctgctcatctacacatccatccatccatcctcccacccacccatccctcccttcatctgctcatctacacatccatccatccatgcatccatccatccatccatccatccatccaaccatccatccatccatctaaccatcttctatttagcccttctctttctctcccttactttcttcctttctcccttcctccacccgcccattcacatatccatccatccattcatccatctaccacccatctattcatctatgtatttacttcttcatccactaaataaatattttattaagaatattcagtattaaacaatagcaccaaaaatctgttgggtgcctccagcactcaggtatccaatagggatacagtaataatagaaggagacattgtcactgctgtcacagagtttatggctaatgagagacagaaatggaacaagtggctattctatgcccttaatgaatgaagaagtgaatgagtggattggtaaatcccttttctctgtcactgctgggcactgggacctgtggagtccaagaatgctggggtgaacaagcagttccatagatcagaggttgcacttgccaggccttcgccagctgggcttctggagtgagataacaggctctgcacagtctgctcaatgtgtccccagccgctgagggcctgcccagactgtgcgaagagcatgcaagggcagggctccctcccgggggcttcggcaggagcaaggctggcagtgacagcagctgtggcggggaacgggggcctgggagcggtcgctgcgaaggacgtcagggaggtgggggcaggtgggagggtggataagtagtaatatgatggggatttcagggggtcagacacaggcagtcccaggctccctgccagggtcaagcatggtgtcttgaaaaaaagacagggggcaagtttcccagggtctgggcagtgccctctgcacctacagtcccgggtgctttgctgggggcctgggctggccctgcttgctgtgagtatgcaagggcggccactctgaagctcagctgatgctggccaggggacactttgtttctgggccacaggacctggatgtagctcattttctttctctctgtaactctccacctgctctgggtgccctgtttctggttccagatacccttacacttcctgcactttccaaggcacacacacagtgggctgcaggggggtctggacttggagcaggagcactaggtgggtgcctggtcactctgggcttctgggctttataatgctcactgtgcaataaagaggaggccaggaatccctctctccagggcagggctgaccgagggagcacagggaatgaacctcaaacctgtgcaacatcaaacaccctggggctcccctgtcatggacagcagactggcttctttactgagcacaggtaacacagtctgctgagcacacagggatctgagtgtgggtaacaggggaatctctgggttctggggaggctgagagacattcctgggacagggacgtttggctgtagatcagagaagttacccaaggaggggatgaggaggggaggatggatgcaaaaaaaaataatagggtgtgcaaggctctctgctgagagggaacttattaaatccacacggccttctttccggaagactctggaacatcatgcctaacatagctaaaatcacttctccttgacacagacaaggaaagcactggggaaagacccattagtgggatttcagacccctgggcaaatggctaggaggcagctgggcagggtgagaaatgcatgcttggtgaccatggtggagtgcccattctgtccagggcacacaggagaaggtgctgcctgccaccttctgcttcccacccaacgcttctggaagagcccaagccaacgtatggctcaggatcccaggggtgtgcgtggagccttctgggcttaggatggtcaagatttaaatgagtttggtagaagaaaacaaagatggtgaggacacaaaggcataagaatgacacaatggactttggggactcaagggaaagagtaggaaaggggtgagggataaaagagtacacattgggtacagtgtacactgttctggtgatgggtgcaccaaaatctcacagttcacctctaaataacttatttatgttaccaaacgccacgtgttccccaaaaacatgttggaaaaaaaaaaacaaagatgggagtgccttagtgtgatcatgggcagggagaaggctggaagggcagaggagtaaccgagggccccagggggtgtctggaagggagggcatatttgtttatcagccaggactcctttcgtttccagtgattgaaaatttaacccaaaccaacttaaaccaccaggagacctgtattgactcatatcagtgcaaatatgtaaatggttcagcctcaggtgctgtttgatccaggggctcaaatgtcaccaagcatctgacgtctctcctccttcacctcctcagcactggccttgtccccagtgctgcataaccccactgccacccgcttagactcttcttggtagcaaaacagctgccacagctccagatcttactgagagtgtctgaaccatccttgtagctccctggcaagccctagttatcactctcgttggcctggaataggtcatatgatgatccttgaaccaattactgaggctggggcatggaacattctgaatggctcaaactgattttatagtcagaagcagggagctggctacatctcacccaagctgcaggactgagtaggaagaggggttctcccatgtagggactgtggtgggcatggatgcaaggatgtgagtgtccatgcaggcatctgtagttggctgtggagtctggacctgattaataggtgtgagcgagagtgcaggaagtcccagaccctactaggaaccctgagcatggagtgacattttcagggttcccctcccagcagagcagtggtgggtcggggctggtagcacaccccaactgggcatgactgtgggagcctccccagaggtggtctactttggcaggatctctgcaacccctgaggagctacaaacaggtaatgcttggcttccccaggcctgcattatgaaaagcttgagttacaaaatgctctggctattaaaaacctgctactgactttaacggcaataaaatatctgctgtttatgagtaattagccacttctggaaaagaactctattcctttaaatttatgaggtgccttgatttatgcatttcatggtggggggatgtcatgttacatcacatcaacctgatgtaatttgatgcaaatcaaacacatgaaggagtgcatggaaacgctctctcctgcctcctgaagtgtgtttttatatgggggaaggttttggtccttattccatctttgttcttcttgcttgctttatcaggaaagtcttaggtgaatctttaccctgaaggtccttggtcctgagtgcactggctgcagcctctgaccacccttcaggtgcttccaagggggacttcacatccccgagggtggcagagatgcaaatatctgaagctatttaatgagcacccacgccttgccctgggttgcaggagcctggggaggccaacagggagacgtgcttcctgattttaaggaccccagggttggttcctatacacaggacatgatgtaatcaatgagtctgatttcatattgtctgagaggtgagcgtggggcccggcagggggaaggtatattttggaagtctttcatagcttctgaacctctgtctgacagcttagagggtagaggtgagggcattcaataatttgttggtgggactatgtatctatttgtctgtgtgcattatttcttctttagtccacccactcatctatctatctgctcattgatccatgcatccatccatccatgtatccatccatccatccatccaacatccatctgacacctactaaatttcttgagtgaggtaacaaagaaaagtaagacacagatgcatatccactaacttgctgtggaaccataggtgagttatcccctaccatctggcctctgtttacctatctgtaaaatgggcacatcagaccaagtgtcaaggagctagatgatctcagatatttctcttgctctgccatcctctgtaccattgtccctttcctcaaggaacatctctgtgcaaggacagaaggtgtggacaactctcattcatgggatgcagagatgcttgccaagtagttgaggagaatgtggggaagagtgataggaagagagataaggtaggatgcagcagtggccctttggtggaagcttttggcatgaatctgggtagtttgccctcaggaaaaacaatgatttttgatctttgatctctgcacttaaatggagttatcccaagggtgcaggggacagcaagtggaaaaagcctggcattgggcatggagcaccacccctagtcaatgtgaacttgttggttggctgtagatgtatctcagccggttggctttcttggcaggatggctggatgggttttactagatttctcggggtcatgtagaaagcacacaccttggtcttctagcatgaggcccttttctgttccttttggtctcaggcatactagctttccagaatgcccagcatcctagcctggcttcctcaaagtgacagtcagtggtgttcaagcatcatgtgtaatgtctctgggctcctgactttagaagggaagttacagttgaaacaaggccacttgacctccttcccggttccaccttgggtgtgacatgagacgatggaggaagtttagggttctcacaaagtccaggttcaatctgtaatataattatttaaaaatggaaccttgctattgttttgatttgagtcttcttgctttctggttaggagtgacatttttgtggtcacgagccaaattttgttgcttttgtgaattccctgctcacatgccttttgtccaggtttctaatgggggtgtttgacttttccttgttaactgcaagtgctcttaaaaatacaaaaggtaaagttattaactccttgcctaccacgtatgcctctgaatgctggtcttccatgaggctttggaacaggtgactgtgagcaggactgagggtgattgcaggcctgatagaggccgcatcaacatgcagatggtgacaggggaaggaggaggagaggcaggagcagacgcaggctttgcagagcacctgccctgtgcagacgctgcttcaagtacttcctagcagtgacctcactcatcttcccaggtacattagcattgccaccgtagcacactcatagagctgacaagttgccccttgggactcagttcttttggagtaagatactgtacaccttcttgaagcagcagcgagttttcctctgttacccagagtcccagtaaagagattcctcataggagcccagagagtagcagtggccaccctgtggggaccacagtggctgctgaaggctgcttgcagcttgggtaggtgatacttccacaccaagctactgaagttacagaacaccttggggttctctgaaggcctctccataggacataacttctggcacctggaggtgggggtgggggaagatgttgatatcaagaccctggtgagatagtacagagtgtccaacatcagatggatggtgcactgagggtcctggaccagcccatgaatggcattttctcccttgtgcagagagaaacattaattgcttcattttagaatatttctctgtgttcagcatcagcaaagttcaactgcagatgggtgatggttcaagatcagggtttggctatgcggtccctccctgtcaggtgggcctcagaggcacccacagggggatagagagaggggctgagttcagggtccagcctgacccgcttccttgtctaacacatgggaagccatgattcagagaggggccagggcacctgaggccacatggctacctggatgaccatgcaggtgtggtttaagggggtggaggaggctatagagggaggatccaggcccactgatgtagtggtggggaggccgtttgtcttggatcctggccctggggctagctgggagaggaggtcagtgcacctgggctggggagaggagtcattaattcagtcagcacttcctgagcacacctgctagtgtgaggctctgctcttggcacttgggaatgttgccctggtggatgtgtcatcatcacagagaggatgccttagctgcccctgagggcatcctatttggttccagttggctgtcttcttcctgacactatgcaaggatctagatcttggggtgcagtgaactgagatcagggagagaggcagcagtagaggttcagaatggaggctgttgtctccaagaacaactctagggaagggagtggcagtgtcaccccgcatcgtcagctcaccccaaaggcctcctctgcaccaggcactaaggagacaaatgaacaagattgttgttctcaaaaaaactcccagtcacctgatcctttttcgagtgaacagtgctcaaatatttgcatcgtctctttgggtggatgtttcagatccatctgtcctttagatgatgagtttcaggagggcagggtgtttgagattctctctgcagagccaggcaccgtgcctggtgtgcagtggagagtcagaagggcttactgaataaatgaatgaatgagtatttgcatgagcaagtacgagaatgctgaaagtagctagggagtcaacaggagagtggagtttgaaaaaggcacgttgaaggacttggaatccaaattagttcaaccagaatttgtaggtacttgtcacctgcaaagcattgggtttcagtcacatgtgggccccaggaggtcctggataagggtacagggtggtgaggcacgggctgtgaaatccaccatgagacagagtggggttagctctttatggagggtgtgaagggtgggggaggggattgggagtggctgtgtggaagaactgttctcttctaagttttctggggtgacattaaagtaaagttctagtgaccaaacttctcacctggctgtgcctccatgagtagagggcagggctggtcatgttgtctgagtcttcctcccggcatccccgctttctccccaaggatagatgttatgctggaggcctgcaacttgttcattcattcatccattcattcatttgttccctcatttgattatttatttatttgcttgttcctctattcagtcactcagcaaatgttcatcaagtgcctcccctgtgcctggctctgtgttgggtgctgggggggaccctggtgaagccgatggtcacagtgtggccctcatggggttttggacaggcatacaaacaaacccaacctaatgtagaagacactgttcggggtgaggccaagataccgtggagatagacggaagggctctggaccgggacctgacatatcagggagggcttcctggaagaagtggtatttaatttctcccaagattactaggcacaggggcaaggagggattgcagagaggagttcccaacaggggaaatgatatgcataaaaggataccaagttgcccctctctgctccctgagaaaagggagtcctttctctttcacccaggctagagtgcagtggtgcaatctcagctcactgcaatctccacctccccagttcaagcgattctcctgcctcagcctcctgagtagctgggactacaggcatgcgccaccatgcctggataattttttgtattttcagtagaaatggggtttcaccatgctggccaggctggtctcaaactcctaatctcaagtgatccacctgccttggcctcccaaagagctgggattattggcatgagccacctcgcctgcccattgggagtcctttttcaaaacactaataggttgaagcaagatgaactggagggttatccattctcaagtcacactttactcccccttctttcctgatcacggttcgaaattggtctttgtccctggaatccatctatggcaggaacactcccatatctgagacagcagcccccagcagccctggttccatgagatgggccacctgcagccagctcccccagaacctgcgttgagggggtcagagtcagtcttccctcctctcccaggaggccagcccggcagaggctgggccagtctggtgacctgtgcaggagctagggatgctaaattggggacctcaagaccaaaaaggaccaagggcccagcccagccctggccagcctccatctgttagcctcagcgcagaaattgcaggcagcaggggacccgatggagtgcctggattttctccttagtaatgatcgtgcttacttaccggatgatgtgtatctgagcttatgtcttcgacaggtgcccctgtggacgaatctccctgggccgacttctataaatatttcaaaatcaagccccctttgatcactcttgcgtatgtgcattttacattatatttagttttgcaccgaatcaaatctgaggcctctgtgaaatgaaaataaactgttcgacacgatatcatagtccacaagtgctcaaatgtaaacggctttaatcaggggtaaaggagcagggaggtgtagcctgatgtctattccctggctgctgctgccccagggaggggtcctgcggaggccagggcctctggttcccagggcaggggctgtgcgctgaggctggtgccaggagccaaggcgggttaataggggattaaatgtctaacttcctgccatgaccaagtctgctttaaaaagggagcaagaaagccagcgagaggagagtaatcaatacactcctgacaactgctggtatctttttcagttttgcattattatgttaaagatataccattcattaaaagcatatatatatatatacacacacacatacacacacacacacacaggcacgcacagagagagagagtcagagagagagagagttcttgttgctttccttggtggggtggacacaattcagataaaaatccattacagagaattagggggctatctccttctcaaatcatcccatctgggtgaaatgggagccctgcttcatggcctagatgctggggtgtcagggctgagttgccattcccaaactgcagtccgtggatgtgacaccgtgggcaacgtcccctctccggcatggtgactgatcataagcttagaggaccagggggcttggaggactttccatagggtgggattctctatgagctgcagacaggaggctggtaacccacctactctcaccaagcttccattctgaggaagcaggatcacttccagcccgggtcaaatccaggaaggtttcctggagcacgtgaagccaggatgtagcatggaggatggagttgggctcacagctgtggtgaggtggggctgggctgctgggagatgtggggaaagtttctgcttctactttttcaccattaaaaagaaggcaaggggagacgaatgcctttttccaaaccctacactcttctttctcatgcacgcggagccctcatcaccacaagagctttgaccttccgatgtttggtttgtggtccaggagtttattttcatcctttactggtttaccatcttctctgactcacattggatagaacactgccttttctagctgcgcatagacagaaggtgtgtacagttttgaagctgttctcttgtaagttttctggagacaagactgtcacccctatagttggtggctgccctagtggaagctctgtggggctgactggatagtcttaggacctcagccgttggcgtcttttttataggaacctggtagaaggatggatgaggctctccctggcagtgtgaggcgtgcatgttatgttcttcctctgttaagagcttcttgagccgctgttttgcccaaatatgaactccattctgctcagattgactttcaagtctgcaccagcccatgcctctgccctatctcctctctgtcccctgagcattacaagctccatatacattttgtacatgctgatcccttgggcacatgtggcctacttctcctctctacctggtgacctcctcaaggctcggccaaggcctgtctccaccactgccttccttcccttctctctcctgcactcccatcccactgtgaccagcatgctgaagctctctgcaattcagcaggtgacccaagcttcatgagtccatccatcttccccccacttccccaattcagcttttaaaggcaagggtctggtcttgcttatagatctctagatgtacccatgtcttgccacatgtaggcattacaaaatgttatcaaaagatgccagtcccactatatagatcctctgataagactgacaacaggagcatttgtttgtttgtttgtttgtttgattttgagacagagttccgctcttgttgcccaggctggagtgcaatggcgcgatctcggttcaccacaacctccgcctcctaggttcaagcgattctcctgcttcagcctcccgagtagctgggattacaggcatgtgccaccacacctggctaattttgtgtttttagtagagatggggtaactccatgttggtcaggctggtctcagactcctgacctcaggtgatctgcctgccttggcctcccaaagtgctgggattacaggcgtgagccaccatgcctggccaacaggagcatttttattaaccacctttacatgccttggtcatatccttcccctctcagcatgtcctctgctaccaaattaagggggcttctggatctaaaaactatgctaactgctgcggtcagcatctaagaagcattactgcacaggtagaaaatgcctcatattctctcccacaaccccctgtgccctctcaaaatcccttgaagtgaataggacagcctatcagtctgttagagcgataaagaaactgaggctctggcaggggaccaaggtcacaccgattctagtgggagagcaggcaattggattcatgtcaatggaacttcaggtgtcattctctttccattactccagtctagttgggggaataagccacctgactctacaggagaatgtggaataatgtatcagcccttctatatattaagaaaatagaagagtctaaagataatttttagggggtgaccctctgctctaccagccagtgagtaacagacctgctacatttctccgtctgcagtgcctgccatgtctgccccacttgatttcactgcctggcctgtgtctttgtgcgtcttctgttccttggcctcctcagagcttgcccatggctgtggcttccttctttccaggcatttcccaaatgactgagctgggttccgactgtcgttatccagcccaacaagaataaatgtgttgcaaaaagccagcctggccactggcatgtcttcatgacttaactttctgagcccctatttcctcatcttttgtattggaataacatagcaccaatcatctaagattgtataaggctaacatgagacaatgactgtgatgtacctagcagtgttggcaggtggtattttgatggagaggaggaagatgatgaagatgaggatcctgttaatgtacatagtgatggtggtggccatgatagtgatgatggtggtgatattgatgataatgatgatgatggtggtggtgatgacgacgatgatgatggtgatggtgatgatggtggtgatggtggtgatggtaatgataatgatgatgatggtgataatgatgatgatggtgatggtagtgatgatgctgctgatgatggtgatgatgctgatgctgatgctgatgatggtgatgatggtgataatgatgatggtgatgatactggtgatgatgatcgtggtgatgatggtgatggtggtgatgcggatgctggtgatggtgatgatgatggtgctggtggtgatgatgatgctgatgatggtgataatgctggtgatgatgatgatcatgatggtgtgatgatgatggtgatggtgatgatgatgctgatgatgatggtgattatgatggtgatggtggtgatgctgatgatgctgctgctgatgatgatgctgatgatggtgatgatgatggtgatgatggtgatagtgatgatgatggtgataatggtggtaatgatggtgatgatgacggtgatgataatggtgatggtggtgatgctgatgctggtgatggtggtgatgatgatggtgatggtggtgatgctgatgctggtgatggtggtgatgatgatgatgatggtgtgatgatgatgctgttgatggtgatgatgctggtgatgctggtgatgatgttggtgaagatgatggtgatggtagtgatactgctgctgctgctgatgatgacgatggtgatgacagtgatcattatggtgatgatgatggtgatagtgatgatgatggtgataatggtggtaatgatggtgatggtgatgatggtgatgatgatggtgatgatggtgatgctcttgctgctgctgctgagggttgttgctttttaatgagaggacagtccatagtcttaacaactaccccatgtgaacttgtcttctttccatccccagcagctacttgcctggctttgtgtggtataggcagaaggtgacccagggatccagaccagaagtcttctctactcagagaagatgacaggagaacccctttgttgccatttttcttttccatctgatgttgttgtgctcattatctgtcttcatttctgggctgcagttttagcagagactccaaaagccacagtgatggaagctctttgcctttgagaatttttttttcaccaaacccaaaccaaaaatggtcacgtctttgagaattttgaagtcatccaaagtttccagggagaagacattcaaattcttttcccaaattctccaactcttgtcctaccagcatggaagctgcctggggctccatgggaccacatattaagccagcccagccaaatcctgctcactactcaagtcagtgagggccttgactttggccaatgttccatccccaaggggacacttgggaatttgactacagtctgcaacttgactctgttggttacacagttgtcattctccacagcctgatttgaatgtggtatttttgttcataaattcagcaaggatttaactatttctggccccatctcatggcactgtctacacatcagtcaaaatggaacaggtcacccgcgctgccctcctgttcatctattaatcatctggcaaataaaccactcagtatcctgcccaccccagtaatgtttgtgatgtaatttgtttggatgcccaaatgtcaccagtgttgattgtaagagatcaaaaaaaaaaaatgcacttgctcagcatagcaagctctaggccaaaatgtaagcatgaaatctctggtttatttttgtaataatgtttacagctgtttaatgaccctgaaaaggttcagtagtctgatgttctgtatttcagaacaggagtgtattatgcttataacaaccttagttaaacagtttgagctacaacaattggaaaaatagtatttaatacgaagccattgtattctaggtgaaattgtcttaattactgtttactgtcagcataagaaagcaaggtgggcttcagggacagactgagggtcacgtgagcctccaggaatggggtctgcctgttactagaagtgcatgttatgagaagattttgagtaaaatccacaatggtgtttggaaacccccttgctgtgaacccgagtcctagaccctgcagagtaacttggaggtcagggactcctacaaggcttccgaggtagcagtttcacccacgtcgatgaaaaagggaatatatttagttgtgcttggctagacaacaatacttgattttttaaaatccagtgcaaatggttattttgaaagcattttattttccaatgattctttttcgtggtataaggaaaaagctctttcatacaacttactggcaagatctatatttttttggactattcataagattacttttttttttctgtgctagcaaaatgaaactgtgtttttgtgtaaaatttatttagactcgtagcagctggcatctctggtgtcctgatagttttaaatttcattttgagtgaaagatacaattaggttctctattggaagagttaagtgaaaacttttgtcattgatatcacaggaaatagtcttgaaggcagaaatgcaaaatcaaaataaccattagcaccatcaaaggcagctgaatggctcacggtacctgcaatgatggcagtgatgagacagaatgtattttgataatctgtgcacccaatggtgggtttcatttgctgagtgtgaaattgcattgttcaagaagaaaacctgtaatgtttggaagccttcacccggggcccctgcctgtgtttagaggtgcagcacaggggtttccacactgtcgtgaagaatcctgtggccaccgagagcctagcttagttcttcatcaatactgactgtggagttgagtccccaaggtgccccaccatgaccctgtgctcagaaaaggtcaggactgggggggaatgttgccatgtttctacattggggggatgatgctgcaaactcaagagtttacagtggcctttaactgtccagcctcggtaaggacatctggctgcctttgcagagttaggtaaattatgcattcatttgttccttccatcaatcagccagggtttattgatcctcttccttataggtttcaggctggggcaatgaactgaaggccaggggcaagctgttctcactgtttagtagtttgtttgcttgcttttaattgtgctaagggtttttctgcccaggtgagctggttcgatgagttcttgcagaggttattcaaagtcctgactgcccagttgccttaagcccaggatcatggcctgccctctgctggcccctggcttccttttttaaaattttagactcgggggtacatgtgtatgtttgttaagttacatgggtatattgcataatgctggggattgggcttatagtgcacccatcaaccaaatagcaaacattgtaccctataggtaattttatcaaccctccctcccctctctccctccccacttttggagtccccagggtctattatctccatctttatgtccgtgtatacccattattgagattagctcaacatggattaaagacttaaacataagatgtgaaattataaaaaaaaatcctagaaacacctagaaaaacctcttctggacatcagtccaggtgaataatttgtgactccagctcctgggtcacgcagtgctgagtgaagggtcagtggggcgtgtaggctaaagtgctctggcagcagggttgggggtgggctgtggcaggaggcccctccagggatattccctatggggcctgtaagggagcagcatggtctgaaagggaaggctcactccctggtgggctgggaaaagggataataagaccttccagcaggtcttttatttgaaattttaaaaaattatcttttaaattatttttgttttttgagacaaggtctcattcccatcgcccaggctgaagtgcagtggtacggatcatagctcactgcagcctcgacttcccaaggctcaagtgatcctcccacctcagcctcccatgtagttgggactacaggcacgcatcaccatgcctggctaattattttatatttttagtagagatggggctttgccatgttgcttagggtgatctcaaactcctggggctcagcctcccaaagtgctgggattacaggtgtgagccgctgcgtctggtcccttccaacaggtcttatcgtttgcaggcagctccacttcctccagccccatgagctcttatgtctgcagctggattcaatcctttaacagtaggataaatgatgccttagtttcccagtgtaggcatttgtatacatttctagagggctatcaggtagggactccccacccttccctcaacacagacataattattgcacacacacgcacacacacacacacccttagacaccaaagctgcgatggtttatcttttccccagctttgcattcagcctcgaagggacctttcattgctccctgttacttgtggacactcactcacgctggccccttagatgaacaggccctcgagggcaggtacatggaaggtccctggcaaatattgactgaatggctaaggtaaggaataaacgcattctggatgggtgaagtgtcaaggctggagaaattggggccgacccaggttttgtgagtcccaggccgggcctggggccagcttgtcctgcctcggctgttttggcgcagagacagcacaccaattaccccatactctttccaggaactcgtgcttccctttcttgctctaagtcgagcagcaggcatcagttatgactgccccattgcagcggcctcggctgcacctgctcgaggaatcacagaggattctaagctgactgtcgtggtcctttctcccagtaaggctctgtgcaggcttctcccaggcttattcaagggctggggaccagtatcctggaagcatctcctagggagctggtcagctcctctgaaaccctggggtctcccatgggcagtgacggtcagttaagttctaaagggaaccattgctgtgtctcctagtattcagcaactgggccatcaggggtggtccaagcctggggtgataaccatggacacctagactgtgagagttaggggtgtggacagcttttcctttccttttgtttctttctttcttttctttttctttctttctttttttttttttttttttttgacagagtctcgctctgttgcccaggctggagtgcaatggcatgatctcagctcactggaacctccacttcccgggttccagtgattctcctgcctcagcctcccgagtagctgggattacaggcacccatcgccacacccagctaatttttgtatttttagtagagacgaagtttcaacatgttgttcaggctgatcgcgaactcctgacttcaagtgatccgcccacctcagtctcccaaagtgctgggattacaggcataagccaccatggccggccagaggtggctttctcttggtggtttctgaaccttcagcttctcagtggtagccagggacccttccaactctgtccgattcggatcgtaggtgctcatggacttgtgcgaaggctgaggttaggtcacatgactgattttaagggctctggacttgtgcaaaggccgaggttaggccacatcaagttgaggttagagtgagtctctattcactcattcatccattcacttaggacacactgaacctaagataagccagctctgccttaggacccaaggcttcatccttgaccaagacagacatatcctctgccttcacgggaatgaagtatgtctgtaaaaggaccaatgacaaaatgttgcccccatggcaaatgctatgtagaagaaagtaacatgttgggacagagaggggctggggtgtcagcctcagacagggtgggcacagagggcttttgtgagaaaggatgtgtgagctcagacccacaagaataagaacagagccaactatgaaagagccggggcagcatgcatgttctagaacattctatcctcagctgaggatctagcaaaggcatttaaagaccttaaagagattacaaatctttgttaactctggccaggatagatagatagatagatagatagatagatagatagatagatagatagatagatagatttgaaaaaaataaaagaattccatactcaaaccaaatctgaaaactctcacattccttatttgacgagttgagctgtcacttgcatagcatgaatggtggtggtgttgggggacatggtcttcaactccatgcccctcatccaagctgatttgcagtctcgccgcattgcacattcagccttctttccctcctgctgaattggcgtcagctcatcagcagcaacctgaaaatagcccgtcttcctggattcatgtcttctgagctggccaactgggcagcctttggaagtgggccagccctgttggccttggactttccaaacttccatggagctgttgggtggaattctgagcaatcctgtgtggcttcagggtcatgatccctgttggctcagaagaggagccagtgcagctgtatggggcttgaaggtggagagagggtgccagacagggccctggggccaccagtctctgcctggagcctccagcaacctctgtacactgtgcctgctcctccctgctggatagtgggtgtcatgagtcctggggctggtgggtcttgtccaccatcatgtctccagtggcaaggctagggactggcacatggaaggatctcggtaagtctgttgaatgaatgcagcaacctccatgggatattagcttttttctgaccaacctccaaaatgggcccgcgtattttaaaaaaatttgagtgtagactgcccccagaagcaaaaaggaaagatgacaagctggaagccttctcctatggcaagtgcccatgcacctttacgctttgcacagttgtgcatatctttcattcgtggacaaagttggcccagcaccaccactgtaatccctctgcctcctggaagtaaacattcatggctctttcttcccttcccttgcaagatagactcctcctgccaaggaagtcaggtctcccattggagaccctccatgccacgcagtctcctggcgggaggcccagcaagcagcagaccctgccgaggctgcctgtgcttcctccacagttgagctctgtccccataggtctccctggttaatcacttagcccagaaatcagtcccggctggggttaagcgcagctcctggaccacctggctgcccaacacatctaaacaatgggatgcaagaggagaggtgtgtgcaaagatgattccaatggcaggaaacaaatttggactccttcaggtgggagacatagctggaaatagaaggatcccaggcaggggttcattgccttgcaaagctgagctccccacgtgctccaatgtggaaggggctgtttcctctgccctccctggagccatctggctttagccattctgcacaggctgaagagggggcagagaggactattaaagacaattatgcagaccagctttgaacgatagtgtttaacaaacaactttgagttctaattttctgcaaaacacatactgcaggtacaatttgtactcattattgtatattgggaaagttattaaaaacactcaaacttggttgagacttcctatggcatcattcctggattttaatgggtttttatctagttctataaaagacctctttaaacccaatcaaagtccctgctttggatatcttgccattgaaggatgggaagagccccattataaggtatcggtgtttcctttgacccaaatttgaacaacttcaacaatctgctaagattccgtcaggagataatttatacttcttttgatgggcacagttaccaaatgataaaataacagtgtttcgtaacataagggttaaatcttaatctctgaggtttgcaaagccgctactcgcagtctccttaaaatttaatatacctcgttaatgcttccttgcaaacactgaaggatttttatgattataatcatgtgttacagcacctagtactgtttctaagcagcatactaatcagcttaatgagatattactgcactttttgttgactaaagcaaaatcccttttattattctaaagcctgtcctttactttattttttcccaaaacattatcttgttttattatgtaccagtaaatatcatgccattgagtgttttttgtttgttttttttttttttttggccaaatcataaaatgatctctttcatctcagactggtgaatgtactgaatatagtaaacggaaacagaagttccaagtgggtttatttggtcttacagggaaagtcattctgctctcaggcaaactttggacggaaccaacaggtacaggtgcgacaatggggcaacggagaaaaagtttcacacgtagacccttgatttgttattaggtgttgaaagtggtaaaacattaataatttaaaggtgaatgaataattgcagtctgtaaatagaaaatacaaggaagacgatctgtcgccaaaacaaattggaggagcaatgccatattgcataattggcatttaataattcatttttttattattgtttttgacaagaattccttagcatgattatgtgtaggtaaggcatgaaatggaaattccctgcccgccaatgctgttgattcatggcgccacagccgcacctggcacggatctgaactctgcctctcttttcagggatggaagaagcgagcctgtgccttggagtgtcttcggcggagccggaagctgagccccacctgagtggccccgtcctcaacggccagtatgccatgagtcagaagctgcaccagatcacctcccagctcagccatgccttccccgagctccatccccggcccaaccccgaggagaagccccccgcatccctggaggagaaggcccacgtgcccatgagcggccagcccatgggcagtcagatggcgctcctggccaaccagctgggccgggaggtggacaccagcctcaacgggagggtggacttgcagcagttcctcaacgggcagaacctgggcatcatgtcccagatgagcgacatcgaggacgacgcccgcaagaaccgcaagtacccgtgcccactctgcggcaagcgcttccgcttcaacagcatcctctccctgcacatgcgcacgcacacgggcgagaagcccttcaagtgcccgtactgcgaccacagggcggcgcagaaggggaacctcaagattcacctgcggacccacaagctgggcaacctgggcaaggggcgtgggcgtgtgcgcgaggagaaccgcctgctgcacgagctggaggagcgcgccatcctgcgggacaagcagctgaaaggcagcctgctgcagccccggccggacctgaagcccccgccgcacgcccagcaggccccgctggccgcctgcaccctggccctgcaggctaaccacagcgttcccgacgtggcccacccggtgccctcgcccaagcctgccagcgtgcaggaggacgcggtggccccggcggcgggcttccgctgtaccttctgcaagggcaagttcaagaagcgcgaggagctggaccgccacatccgcatcttgcacaagccctacaagtgcacgttgtgcgacttcgcggcttcgcaggaggaggagctcatcagccacgtggagaaggcacacatcacggccgagtcggcccagggccagggccccaacggcggtggcgagcagtcggccaacgagttccgctgcgaggtgtgcggtcaggtgttcagccaggcgtggttcctcaagggtcacatgcgcaagcacaaagactcctttgagcactgctgccagatctgcggccggcgcttcaaggagccctggttcctcaagaaccacatgaaggtccacctcaacaagctgtcggtgaagaacaagtcccccagcgaccccgaggtgcctgtgcccatgggcggcatgtcccaggaggcccacgccaacctgtactccaggtacctctcctgcctgcagagtggcttcatgaccccggacaaagccggcctgagcgagcccagccagctctatggcaagggcgagctgcccatgaaggagaaggaagcgctggggaagctgctgtctcccatctccagcatggcccacggcgtcccggagggggacaagcactccctcctgggatgcctcaatctcgtgccgccgctgaaatccagctgcatcgagcggctgcaggcggctgccaaggctgcggagatggaccccgtgaacagctaccaggcttggcagctcatggccaggggcatggccatggaacatggcttcttgtctaaagagcatccgctgcagcgcaaccacgaagacactttggcaaacgccggggttctgtttgataaggagaagcgggagtacgtgttagtgggagcagatggctccaagcagaaaatgcctgctgatttggttcacagcactaaagtgggcagccagagagacctgccaagtaagctcgaccctttagaaagcagtcgggattttttgtcacacgggctgaaccagactctcgagtataacctgcagggtcctgggaacatgaaggagaagcccaccgagtgccccgactgcggccgggtgttccgcacttaccaccaggtggtcgtgcactcccgtgtccacaagcgggaccgcaagggcgaggaggatgggctgcacgtgggcctggatgagcggcgtggctcgggcagtgaccaggagtcccagtcggtgagccgctccaccacgccgggctcctctaacgtcaccgaggagagcggggtcggaggcggcctctcccagaccgggagtgcccaggaggacagcccgcacccctcctcgccatcctcctcaggtaggttagctgagaagcggggagaagcagcttgtacagcagccctgctcagggctgcctggttctgctcccaggcctccagtcagttccaaggccagtgggtcttgattgaggacaggggtgggttggacactgggccatgcctttctttccccccctgactggagggaaagggccgtcctttcacctcttaggccttcccttgaacactggctaccaagaaagtaagttgaggccgggtgtggtggctcacgcctgtaatcccagcactttgggcgcccgaggccggtggatcacttgaggccagggattcgaggccagcctggccaacatggagaaaccccatctctactaaaaatccaaaaatttaggcaaatgtggtgatgcatgcctgtaatcctagctattcgggaggctaaggcaggagaatcgcttgagcccgggagggggaggctgcagtgagccaagatcacaccactgcactccagcctgagcgacagagtgagacactgtctcaaaaaaaaaaaaaaaaaaaaaaaaaagaaagaaagaaagaaagaaaaaagaaagttgtgcgggagatggccaggtggtacatttttcagtgggcataatctacctttttcttgcaattgtccaaccccatttcaccgcctgacgctgtcggccatcatctggtctctggaactcaggagctggcattctgctctatccctgggtatgaatgtgtaagttccaaacttcaccatctttctctcccccttagcgtattcccataattctctcatgcaggcaccgcagtctccctccccaagccaaacctatcttctggccccttccaaaattacaacgtggctcacctgccagatccgtgtgacctaaagagccccaccactttcctctgatggtttggaaaagtacaggcatttgaaacacagacgcatgactgttctgtcttaaattgtactgtgttacacggctgatacagctttggggtctaaaatagcaaagcagaaaatctgtcatcaaaatgtctgtgaaattatgaagcttcctggcccagtttaaaaaaaaaaccaaaacaacaacaacaacaacaacaacaacaaaacacgctagcctcagacggctaaattaaaatcaccacctaacagcaggtaaggcgttgccttcatccatatttccaaagccccttactaatggatagtaaattgaaagttatctctagccctttataaagaaagcacctcgctaatactgtaatcattctgcagcctaacaacagaggaaatcatgccataacaaataccctgttactaatggcaacattgatttctgcaatcagccattaagtctagaaaatgaaagacagtttgaggcacctcgaggcactgccttgcccactgttaaagacgtagcagcaccctgttgagggtcattttttaaaagttttttcttctttcttgatcccccccaccctcactctttggtttagatacctatttcgatcttggaggcaattcactgctgcacttattaagtagatgccagttttagctttgctgttatagtcttgcttaagcatactcttcttctaggacaaaattagtattaaaataaagtgggactctgccggcttattacaaaccagtaaagaattgttaagacacataaatctggtctgcacattccagagattccgatagcacttaatgccgctgcttaaatacccatgaaacacactgtctactcctggagtcctagacttgtttgggatttattacggatgagacacttaggaagtgtctaaccagcagcatgagtgccaaggaggcgtgaggtcacactacctggagcgactgtcacatggaacatactaagattcgagggaagggttttcaccatgtaaagatagatccctacttgagaggcagccaagtgccaggtgtcccaatgtcaggaggagctctttctggcctcctaggatgaggtctgctcttctggcatgtgtcgtttctgattctggattaggacctttacaggacagggtgcagacagcaaactggttcccctaagtttttagagtgacatggagttaacattgacagatttccatccctctctcagacctcctgaaatgtaagggtctcggcagaatattctgacaccaaatgttcagcttcattaatgacgtgtttaccgtgtttttctcaccttctggccaagtgatagcctcatgctattcctatctctgttgcttgcctatctctcagtgcttggttgaaaaaacccattttgcttaaaaagaaccaaccgtgctcatgactcaaaagagaattatacttgagttgtggttatcttctcacttttatttcccctcattgaagtattttacaattgtgaatactgattctttcatttctggttgacttctttgttttcttcatattcaaattagaccctttcataattttctgactaagtaggagaattgagggcataccaatatacaacccgaatcagctgtgcgtctggggcattcaggtttccctgggatttaggactcttaaccaaatctggttagtcctccctcttatttccaacaagtttgacttgtatagaagtgcgattaaaataagcatttaaataaaaatctggatacaatgggtattttattattacctgttaaagagaaacctgcaaggtgaaggagagagagagaaaaaatctttaagcccttaagtaaagaaagaagtacttattaaggcttctattaagaaataactgcaaaacacggttttacaaatttctcagactgcataacaatgtcgcaaaacttaatttgcatcacttgattcttttttttgttgaaaactgggtcagtagggcctgagaaactattttttcagatcttaaccaatgaattcttctttataaatcgctgctcttaacatgatagtagttctgaattcatcataaaaaacctttttacagagcctcttagaacagatctctagaagaaggcttacaatgagtggcagagacgtcctttgttatctgatgtaattctttgcaaagaaggattgggaacggagtggctgtttaaaaatgtcttgctcagaccgagatgaagaaggggtcaagtttgcaatcaaacagttattgccgagatgggcgactgtcactggctaggctaatgtgggatgcagctgtttgttatgtgagcaaaagaatgtttgaatcagtgaacatgtgaaaatgattccagtgaaccagaaaatgtgtttgttctttggctctccaaactgctgagaaccaagcttaagatcaactgcgaaaactaggacctctgacaaattgagaggtcatattttctaacagaaaatggacaaaactagtcacacagatcacttccccatcttccccctttgttttatttttgttttgttgttgtttatttgacttaccagtaatttcacaccgtggtcaatgtcattcaatgtagcctccgtgtacaatgcaaagagaaactgtttggaaagcagcagcttattaattttacttttatggcatttagaaagcggggtggctgtttcgatgcctcctcatttctggcttgcatgcaaacactcttatggcattaatctttgcatctttctctaaaacctcctctagggctgagctcgaatcctcgctttgctctgagtcagaacacaaccaaagttctgtttcttcagattttgctttggaaatcacactcagaataattaaaacttaatgtactaagaaatgatactgttcattatatccaacagggcagttaccttctgaattccacataattttggagtggggataattgaagtgttgatggtgggaagggggtaattgaatgcattgaccctctgttcattaaataaagtcggctaagttacaggatcaatggaaagccagggagagatgcgaagatgaaaatatcgttaacccctactacttctggtataatattttgagatggacaaggattatttggtcagctgggctaaaagccttgcgaggtcttcttttgttgttagagctgcattcctgaaatgctgggtctccatcccattgaccacagcatcaaaggcctttatctggggcgctttcgcatttacatggggtgtatagtgatatgatagattttctttcttttccacctctttttctcatgtggctccccctccctgcccccgttcacgataaccggtgcctgctccacacacaaacaaatccaggcacccaaaagaagaaaaagaaaaagaaaaagaaaaaaaatttgagtttgaggattaagatcttcatttttttttttttttttgcttgtgcattccaattgttcttaaaatatttggcaatgtcaattagtaactgagcagagttagctgatgaacacaattttccagtagactgagcaccctattgttgccgagcgaacagcagatttctgaggtcattatcattcgctggttgcttggcccagctgcttcctgctgcaaaagccaaactttataccggagctcggggaggctgcagcaacagggggctggagggggggagaggggagctggctgcagagccgaagacagtcattatcagcagaggaaacagaaagtaaaagtttccaggcaattccaggaaaactgccggagcaggcttcttcctcctgttccagtccaaccaccttccacctctaggcagggaattaaaaaggacttggggagacccccctgggcatggtggcagctaatctctttgtggaggagaactttggaaaacaataatcccatttataaataatgcttaaaaatttttttagcccaggctcaagcatgtgagtgatgccctcttagatagcctccttcattgttatatatttaaaaaatcattttaaaaatgatattaggaacttgaaattagtcaatttggggatgacaaataggcaacattatttaattttccagagggaccttatgaacagatcatagtctgagattccttttaaaatcacatttagccttaaaggttccccctacgcctccccctgtcccctgcttccttatttttctgcccccagcccaccccaactccagccttccttccccacctcctaatttgggaactggttcagtgagatgaaaagctgcactttttttaaagctcagctgtgaaagccgagcgccatatgcagcccttcggtctctgccgtggaagcgtgtgcaggcggccgccgtgtttgcggagatttacggaggatcggctcgtgtgtgccgaagctgtgcccaggcggacgccggccaaggcccgtcccctgagctgagagccgagagctgaggtggccgcccgcctaggcgaataagccggctggtcaggtggctcctggggaatgtcagatggggcacagggtcagaggcccccgtgtcttcccctggcggccacctttccgctggggcccaagggtggtctgtccacttgggacgccctgctcgtgccgggatcgccgttgctctcagatgctggttcatgtgcggctgtcacatcatcctcctccttccccggagccggatgcctaccagcagtttctttttataaacttcccattcacttggtagacttgtatcatctcgtgcttaggagcgatgatttgggaacaatcagtaacacttcggggcttttaccatctttctgacccctttacatggagccataaatcccgcttctccggggctgcttgatgccagtccaccgtcacttggcatttcagaaagagggtacttgcacaggctctgaaagtcttcagactaggagtgtaacatcagagatgtgtggcataaaattgcagaggcagagcaccctctctgctccagcacttaacaggcaggacatggttttgcttgtgagggattagattcgaggccgcggagtcactcaaatgtgtttctctggcggcctcacttggcccatctgtgggatggacaccgctgttgcctgggctgcccttctgtttccaacactcctgcccacggagcttctgaggagctccatgaagctctcctccctatgcatgttagcgcaagggacggaacagttcatttaaacctaaatttaatggaaataaggaaaacatagattagctaaggacaggttacaatgaggcaaggaattaagcggtcaattttcaaaacagagcttgaagcattagctgcgtgatttccattgactcgaatgggaggttccaggctcaggtcttgaccaccaccttgggtgtgttggggtgggagttagtaatttgctttgcagacagccacaaggtgtcccttgattgatggtttggccagaagcaggtatcacgagcttccaggatctgactcttacccactcccatgcttaccatgcactcaggtagctgggaaatgatgcccactgtgttatgtgagccctgccaggggccacttctgcagagctggggcagcctctgcatagagggcagattggggtccttctggccgcccagatcccttcactgccaggttgcttatctttctaattctttctctggtttgaagctttgtgtcctgttcataggaagtgcgttcccaggaagggtaaggtaagactttcttcctctacatctcagtgcatttcccacgtctgccccttctccctgagaagtttctggcaggtagccctgatgtctcaaaggggtggggacagggctggcttcaacaaggcctgttatactggcctcgatattccactggttctagagagagaccgtgggtatacttggagacctagagatggagacagtgaatttcatgggaaagaactgtgcagggagcatttggaagccttttgagcctgggaagtcaggggagtgagtagttaactcctttacccgtagagctgttttggagcattgatggcaggggtggagaaacacctgcagagatcaggagattggatttgtgcacacttcccaaatccgtgatgattggactggaacctttgccatctgtgacccttgggcctgtttgctgcccttctgggtgtctcacctcccttcgtcttcctctcctctgtcggcatctgatgggtgcatctctccacccttgttgatggtgctggcatgtggaggaaggaggcgggggctgagcgaggcttgcaaatgcagaggaaaggggctctccaagaggggtgcatggtgtcgggggggtgggcaggtggtggggggactctgatctccccaggaagtgagctttgctgcagctgagagcggccatgggtcccccttgtcttttgctggcaggatggggcgatggcaacatttacttaagctgtggagtctggcactgccgcagccaggcgccatctggaaagcccttttcagaaagctgtgtcccccccacccccaaaaggaacttaggggaacaggacttgggcagagctgtgggacttgtttcttgggcagaacctgctcactgaggcacctgagccgggctgggtttccctgggagccaggtagataagacaggtctacctcggggtgcatgtgggctctttgctgtctgtggggccctcggttcatcctcgagccaggtctggtttaggtttactagggctgtattttccatctatttgttttgtgttgcattttgcttactctcttcacctaagtccttgtatattgtgagtatgatggggtggcgccagccgggattggtcagtgactgttccttccctgtaatagcagggctgattagcagaatataagaaatgaatgctgtgcctctgaaatgtgcctgtgagacaggatctagaactcagcggctcagcttgcaacaaacagggcaaactaagcacagagatttgctaccatcctttccctgagccacatcttcaaaaaagactgcagagtcccaaaacaatgcgtgtctgaacaaacaccatcttcagctacctgatgggtgggcctgggcaaaacgggggccatgccgaaagcaagggcagcagtccaggcagaattcatttgcctcctgtttccaccacccccaagagaaagttgtccagggcttagcttcttgtgggacccatctctttgttgctgtgagccttggggtttttgtgtgacatgtggcatgtgtctgggagaagcgagaggcacagcacaagctgactccttggcttggctgcccaccacaccacatgggaggccggccctccccttaacggtgcccagccaggaggctgcctccaatgtgggcatgaggacgggcttggctttaacacctcctcacttgcttccaaaggacagggtcattttccagcttttcttgcaagcagtgtctacctttaggaacctttcagttttactctgtgccatggggcccagggcatttcacggagaaatcagtcctttcctttacagaggcaacttgtaggactagacttttggccaacgctagtttcttttcttttgtctgacctcagttccaaaaccatttgatgcacgatgaaacaggatcgcgccacagtgctctcttctcttcattaaagtaatgtccagaaactcttagcacagtggtggtcatcgtggcttttggacactctcagttgtcctcaatcatcttgagaggcattctggaacatgttcaacatgttaacgttgagttcaacatgaagtgtatgcagtggtggttttcttgaagatcaagacagatacatgcttctctttattgctaaatatgtatatttttaaatttgttgctaaaatatgtgtttttattttcgtttcatttcattttttaaaaactcagtagtttgccctgaaaaattggagtgatcctgcagcaaagctgctatgtggcatcataatccctgttgagagagaaggcttggcagtgttcatgtccgtctctggctggggccagacccctcggaaatgtcctttttagtgaccttcaaaacctttccacttgggaccgggtgtggtggctcactcctgtaatcccagcactttgggaggccgaggcaggtggatcacatgaggtcaggagttcgagaccagcctggccaacatggcaaaaccttgtctctactaaaaatgcaaaaattaaccgggcttggttgtgggcgcctgtaatcccagctactcgggaggctgaggcaggagaatcgcttgaatccgggaggaggaggttgcggtgagccgagatcaagccattgcactccagcctgggcaacaagagcaaaactccatctcaaaaacaaacaaacaaacaaacaaacaaacaaacaaagtttctacttggtctcgtccacgagtcccgttcactgactttatgatgctgttgttgttcaatgacttcactattctttttttcttactataaagtaattcttgttcatcttggacatttaagagatacagataaataaaaaataaaaaaaattaaatgtgtatgcctaccaccactcaggaataatcactgtgaacactttttttttcactaaactagtaaatattttgttatcgatgcatagtttatgtatagattttagggtacctgtgctaatttgatacattcatataatgtgtaaagatcgaatcagggtaattgggaccttcatcaccttaaatatttatcttggctggatccagtggctcatgcctgtattccaacactttgggaggccgaggtgggcagatcacttgaacccagcagtttgagaccagcctgggcaatatagcgaaaccctgtctctacaaaaaatacaaaaattagccagagcggtggcatatgcctgtagtcccagctacttgggagggtgaggtgagaagatcgcttacgcccaagaggcagaggttgcagtgagatgagattgtgtcactgcactccagcctgggcaacagagcaagaccctgtctcaaaaagtattatcttttctctattctagaaacatttgaattattctcttttggctattttgaaatgtacaatagattattgttaactctcgtcaccctactgatctatcaaactcgaggtgaacatttttaattcatacttttccagtcctttttatgcaactaaaaatgtagttagccaaaaagtacatacttctgtgtaagttcttactgaaatgtatgtcatattttttcttgtcattgaacatttcccaccaggatcagcaaagttttcctgtaaagaaccagctaatgagtattttcggctttgggggccatgtggtttctgtagtaaacactcaattctttcataaataagagtgtgatggtatttcaataaaactttattgaaattgcaaaaattggcaatggttcagatttggaccctgggctgttgcttgcagattcctgtcctaatagtaatagttatacttttttttccccaagctttacacaagtaatatgcacatggaggaaatgctagaaagatggagaatccaagaaaaactctatatctataaaatggtttagccaatctctgattcgtgaacacgggacttgtttcttttcttttttttttttttttttttgcctgagatgcaacctctgaggtgtacgtttctgcagcatttgtgacctcatcgatcattctgatcttctgcaccattatttccttaggtgtgttgcctcgcagtagactctctggtcacaggctggtgagtccgaggtggcagagctaaaccacccactgtgtgctgcggctctagactgtttgttttacgctggtgtttgcaccatgagaaaatcccctcgtaagattgtactgaagcctgtctccctgaagctaggtagttccctatcaccacgccactctgtgacttatttgttcattcataaatacactcatttgtttgttcaatcattaattcacttatttattcactgaatgatgaaatgcttattaagtggcttctgaacactgagcaaggcatcaggtgctggagatgcaaagatgagtagaggccgggcacggtggctcatgcctgtaatcccagcactttgggaagccaaggtgggcagatcacttgaggtcaggagttcgagaccagcctggccaacgtggcaaaaccccatctctactaaaaatacaaaaattagctgggcgtggtggtgggcgcctgtaatcccagctactagggagactgaggcaggagaattgcttgaatccaggaggcagaggttgtggtaagctgtgatcacaccactgcgctccagcctaggcaacagagcaagacttcatctcaaaaaaaaaaaaaaacaaaaaaaaagatgaatagagatgcatctcagtgtctggaagcccacagcctctaggtgctggacaggtaattcacagagtgagacagacacatgggagggtttaccctggggcctgtgggagcaccttggtgcccagtttgttctcaaaggatctgaaagggcaaggaaccacttcaattagctcagcgacttctttggcaaggaggagtaactctttccctctgtagaattaggccaatcctggtgacttcctggaggaagcagacaagtctcttttagccactgtggctggctgctgttctttccctggctgggagccacagtctaagtaaatgccttgtcacatacagaagaggccctgggagaagagtccagtgggtgcttcccaggaaggcatcccaggctgggaagggagggagagggccggagcaggatgggagctgctgaggcccagtgaaagctttgttgcaccctacacaccacatagggggcctccccgagggagagcactctgggggacgcaggacagttctccacaccagaaagtgagaggcaggctcctggctccagctcatggccccctgaccatgctgtccttggaggcagtggctcatgaatggaggaagacacatcaggtggtcaggggtgtgaggctcctactgggaccctgcagctggagcgtgcagagaacctgtgaggccccacactgggaaggagggctcacattttatccatttccctgtctgccttaggaactgtccatacctgccccacaggggctctgggtgtctcatgggagggctgcacccccagtatgtcagaacgtccatctgcagcctgcagcagaggattgcaggcactcgtggatacggcccctcttctttttgggtggtgggtgggacatgaactgaacgagggcttgctatgagaatgggtggaagtgacttctagtcaattgccctttatcttctgatgaagcaaaacgtcatatacttagatattaagccagagacaaacacattttctcacgttaaaggaaaggctgagggcggaacgtccccacttcactttggagccgggccccacacacattttcggggccatgcgtttagtcatcctgctggactatttgggcagctcgctttccttctctgggctttggctttttcctccacatcatgggaatttgggtggggaagtgtagaagattcggagacgcctctcagcttccatttttccttcatctttcaatgtttcccccacctttctctcctctcccttcctaaatgtttccatggcttgggggtgattttaaagggtcttacctgctgttccttgagtagagaattaacgttcctagggtccaagtatttcctcaatttcctgctgtttttttttttttttttttttttgaccgagtttcactcttgttgcccgggctggagtgcagtggcgtgatctccggttcactgcaacctccacctcccaggttcaagagattttcctgcctcagcctcccgagtagctgggattacaggcatatgccaccacaccaggctaattttgtatttttagtaaagatagggtttctccatgttggtcacgatggtctcgaacttccaacctcaggtgatccggccacctcagcctcccaaagtgctgggattacaggcgtgagccaccacgcctggctgatttcctgctgatttttgcatctgagcttcatcgtgtcgtctctgagggacccatgtgcctggtgaggggctggggagactctcttctatctcatttcccgtgggccccccttccacctcccatctctcctggatgccatagaggcagagccttgcagctggaggggcactgccagggcccctgctttacccagcacgtctgtgagtgtgttaactgtggccgaggactctggtgctggcccttaggagctgtgtggcccagcaagggctcctcagcctctctgtgccttggtttcctccatgtaaaaatgaggacgatggtagtgtttgcctctctttataaagcccttagtgaagactccagtgctcaatagacgtcatctgttatgaggtttatttctacgctatacaatacaaacacaaacaggtgaaaatgggcaacttggccaggggagtggttggtttttcatttttatcattttcattttttttttttttaccccattgaatgtttatttcatttgggtacatctttctttttctttctttctttcttttcctttccttttctttctttctttctttccttctttctttctctcttttttttttttttttgatggagtctctccctgtcacccaggctggaatgccatggctccgtcttggctcactgcaacctctgctttcccggttcaagtgattctcccacttcagcctcccaagtagctgggactccaggtgcatcccatcaagcctggctaatttttgtatttttagtagagacagggtttcaccatattggccaggctggtctcgaactcctgacctcaagtgacccacctgccttggcctcccaaagtgctgggattacaggcctgtgccactgtacctggcctgcagagtgactgttgggaggtgtgcagctcacggggtcggcctcactggtttgtgtcattgaatctggtagccatttgtctatatccctagtgcgatgttgggaccagttgtttgcatcaggctctcttcgctggaggttgattagggtgcccttgtcgagcagtcactgatgctgtcctaggcaggcagctttccttctctgtgtggagcaaattcaagatggtttagttcctgcccaacatgccacagtgagtctcaattcaaactgactttaactacaattataaccacagaggagcagtgagattcacggaactggaaggtctggactctaactgaggtggagttagcagctcaaacggcaaccccatggacttacctcatagtagcaaaatggctgccatagctcacacctcacatccccatgccaccaaacagagcagcacttttttctagaggtctagcaatgatcttcttgcatcctactaggtgtttttgtactattatgcccattcctgaaccagtcactgctgccaggggaatggggtgtaccacttggttcatggcaaggaagttagtccttggaggagtgggaaagagagaatgccagctcatccatcccgtggccgaatgtgacagagagaagctttctcacagagattcagacggaggaggaggcatggagcttgggcaactaaatggtgtccaaaatgtcaccgctccgaggttcttctagtagcagaggcactggccctcctgctcaggatacctgaagaggtgtcctggcctccctgagcaaggtggtttggagtctgcacatggtgacgaggttctgtcctctcattctcccatcacagagatatgactgtgttacatgggtcagcgagttctttggccactttctccaggagtccattcctgcctgttctcttctttttggtaatactgagtctcatctcagctaggaagtgacaatggacaccagcaaagccaaatgacatatccttccatgtggccactgtgtgtgcaggactgtgtccctcatcatgttagtggagaaaggggtggcacccaagaggaagggaaggtgggattccctgctcttgaggagaagctggcctgtctttgggaatggcccacacataaaagagagttgggaagccacagaaaaacagtggttagctcagggattgcgactcagggtgcagggcctgggatgtcctctcaagcacaagggaacagcctggtcatcttccttgcacctccttctccttcactgcctcttccccaggtagaaacaagatgcctgccccccaaacctacatttgtcctcactctgaaaggacacagaaggagataagactgcagggtcaggccgtgtgggcgcgtcggaggggttgggcatagggtgagcccaggcctctggcatgggctcccatttccctgtttcccaggagtgttccacagaaggtatcactgggaatctgccctcccagagattcccagaggtctggaggggacagcgtatcagcggttgtgtaaactgaggcatggagaggttggattgagttgtaaggctagaagtggcagagctggcatttgaacccacctctgtgtgacctcacgccttttaactccacctttgggccatgctgggagttgtgtaaatgcagcagaaggcagaatgcagctcaccagcaaactcggctgctggtaggacaggctgcagggaggtcagaggtcaccacttccctctctttgcttctcagtaggagtcatcccgacatcccttcagagaaaggagcagggaaggaggatagcccagcacttactcccttggtgatgtctgatgggacccccctgagccccacacttaggcttgaggtgaccccccagagctgtggttgtgaatatccccgagcccctgctcaaggtcacacttgttcccctagtgtctaagacagggaggaggaaaggggaagaggccctctgaggccccaggagcatgggctggcagacaggccagcacagcctgacttgggctgcccggctctccgcctgtgtgagcttgcccccgtctcagttccccagtcccttctgacactatgatgcttcatgagtgtcctttacatgctctagcccgcagctccgtgtggggagatggcctgcatgtgtggctggtgggagaaggggcctgcaggtagaagaacgttgctggcaccgccggtgctgccttgtgcatgagcttgcagacaccatccggaagtcagctctccacccccaccccttctccagaagaggagagactcccccatcagtagacaaagagaaagagaagaaggagatctctaatcctccggcctggtcagggcagtccatggggttgtaaattaggagggctagatgattgtctgggagggcctccagaggaggggtggctgagagttttgttgttgtgggcacagagggctggagcaagcagccactttgcactggacacatgcagcaggaagcttggggctggcacgaggccctggccccacctaagatgctcttggagaaagggcccaggactcagtagaggggctgagtctgctgtgatggatgggaggaggccagcaggttcttttcttgtgattttgtgtgtgtgagtgtgtgtgtgtgtgtgtgtgtgttgaatgtgtgttgtgcatgtggggatatggatatattggtgggtgtgcttgtgctgtcttggggtggtgatgctgtatgtatatctgcaagttaccttaatttttcaggtgtaggtagctgcgggtgcatgtatccctctgtgcctgtgtgtatgtgttggcgtgtgtgtcttgggctatggctgtcttggtatgagagaggatgtgcctgtgttgagtatgtgtattgatgtgtgcacaggtgacagtgacttgggatgtgaatgtcagtatctttgtggttattgggaagtgttaggatgtggcatttgggtgtgcaattatgttgctgtgttggcatgggatggggtgtgtgttgtgtggataaggatgtgtgtgttgtgatgggtgtatccatatgcatttgcctgtgttggaatgggatagggtgtgtgttgtgtggataaggatgtgtgtgttgggatgcatgtatccatatgcatttgcctgtgttggaatggaatggtgtgagtgttgtgtggataaggatgtgtgtgttgggatgggtgtatccatatgtatttgtctgtgttggcatgggatgggtgtgtgttgtgtggataaggatgtgtttgctgggatgggcgtatccgtatgcatttgcctgtgttggaatgggatggggtgtgtgttgtgtggataaggatgtgtgtgttgagatgcctgtatccgtacgcatttgcctgtgttggaatgggatggggtgtgtgttgtgtggataaggatgtgtgtgttgggatgcgtgtatctgtatgcatttgcctgtgttggcatggattgggggtgcatgtgtgttgcatatcatgatggcttattattacatagggtggatttgacctcccccaaggactatgaccttcaactttccttagaggagaggtatctgggttctgagactgtccttgcccctttttccaaaaccttcgctcatcactagaggggtcttccctccctaatgctggctcagcctcaggtggaagatctggcttttggggtgcaagttgggaaatgcagaaagccctgccttccagtatgcagctgtggcctctccagcctcaagcacctcctggaagaagctggggcttgaggctctggggtccccattcagggagcctctgttctggagctcagccagccttgtgcccggaggaggtccgtgagctccatgaggcaggggttgtgttttcttcagccgtctttccatcatgcttccctgcacggggcatagagcacagcagatgtcagggaatgtggtcaacttatacagaatgaaatgaaatgccttctctcagcacaaaaggcactttgcccagcagccaactgggatttagtccttcccaccgctcttcctgtaagaacctaaatttacagcacagggcctgccaccgtagacttttggtgggggttattgtgagctgggcaggttaccaggtgcatgagggagcgtgggggtttgagatggggtgcaggcatggtggtgtggctcggggatgaaacctcatggtgatgtgttctgtttgctgtcagcatcctcgggaccccctctcagggacagtggtgaccttggctccatgtccaacttctccctggatgattattctccttcacgagcctaagaggcggctctaggagtagctgttttctctcttgcctccctcctgttgaagttcaccaacagagtagctgcctcattcacttgtgcctgttggaagccaggggtacaaccttcaactgcggtcactgcctcttaggtctgcggagtgtttaaggcctaagccctgtggccagcacctgcaaagtgatcacatcgctgcttacgggtttagctgaccaagttctatggacacgatgaaggattaggggtgcaggcctggggcgatgggggtggaagtgagtctgactgagtttaccacaaggcagggatttcagaaaggcacccacacattctgcagccagctgggggtgtcgaccagagcctggggaccagacggcgctgggccctcgaggggtaaaggtcaatcagcttttcctgacctctgcatgcacataacataggaatctccctttcctgaaattccaacacatcttctcccagccatttcataaggtcagaaagaacaaatttcaagaataagaaggtagtgggttaggggagtcatgaattggatgaaaatcatgggatcatgattttcctggaaatcaccaagaccccaagtggcagctccgccagcttctgcttggaaatgtgtgcagccaggtgcattggggtcaatggtccttttttggttagtggttgatgacacgctgtcatctccaggaagtaggtcccatgggaagaatggcacatgggtccaggagactattcaggggagagagagcctgagcacaggagaaagggcagaacatgagtgcccaggagggagagggcaaagcggggtccatcagggtggggctcctcctcctgcccgagttccttaccaggaagcacaaggttctgtggaggcctagagggcccctttgatggctgtggctcttcggggaatttggatggaaagtggctggaacccccaagggatgcagcactctggagaacagggactgcctgatgagaactggggccgtcggggttgatgagagagcagtgatgtcagcccaggcaacagagtggtcattggaaccatattgtttccacgcttagaatcccccagtgacttcccattcatgaagtacggagttaaatctgtggcggacaaggccccatcacctcccactctccctggtctcactctgctgaggccctgccaccttgcctctattctcattccctgaagccagccctgtagtggcctcagcattgcctgctgctctctcaggcctgctctccccgcagaccatcctgttactggcttcatctcaccttcacctcaacgccacttcctctgggaggcctttccagggaccttagtaggaactatccctccccagtcaccccctgaagatgtttctctgtaggatttgcatctctgaggtgtttggagggcaccttgttcactcttcctggttttcttcttcactcattcattcattttctttcttgtgtatttgttgacttgcccctggtgtgagcgccaggagagcagggttggtcccttatcacatcgccagcacccacggcagtgcctggcacataatacagactcagtaaacacttttttaaaatgtgtggtaaaatacacgtaacaggttgggtgtggtggcttaggcctggaatcctggtgctttgggaggccaaggcaggaggatcacttgagcccaggactttaagaccagcctggccaacatggcaaaatatcatgtctataaaaattattttattttattttattattttattttatttttgagatggagtcttgctctgttgcccaggctggagtgcagtggtgcgatctcggctcactgcaagctccacctcccaggttcatgccattctcctgtctcagcctcccgagtagctgggactacaggcacccgccaccacacccagctaattttttatatttttattagagatggggtttcaccgcattagccaggatggtctcgatctcctgaccttgtgatccgaccacctcggcctcccaaaatgctgggattacaggcatgagccaccgtgcctggcaaagaattttttaaaaaattagctgggtctggtggtgggcacctatggtctcagctactcagaagggaggaggctgaggtgggaggatcattggagcccaggaggtagagactgcagtgagcaatgatcgttccactgcattccagcctgggcgacacaatgagaccctgtctaaaaaaaaaatacatataacatagaatttaccattttaggctggacaccatggctcacgtctgtaatcccagcactctgggagactgaagcaggaggatcacttgatcccaggagttcaagaccagctggggcaacaaagcgaaactccattgctgcaaaaaaaaaaaaacccaaaccaaaccaaaacaaaaatcagctgggtgtgatggtgcatgcctgtagttgtagctactcaggaggctgaggtaggaggattgcttgagcccaggaggttgaggctgcagtgagctgagatataccattgcactccagctttggtgacagagtgaaaccctgttagaaagaaagaaagaaagaaagaaagagagagagagagagagaaagaaaagagaacttaccattttaactgttttttttttgttttttgttttgagatggagttttgctctgttgtccagtctaagaaagaaaaagaaggaaaggaaggtaggaaggaaggaaggaaggagggagggagggaaggaagaaaggagggaaggaaggaaggaaggaaggaaggaaggaaggaaggaaggaaggaaggaaggaagggaaggaaacttaccattttaaccattttttttgttttttgttttgaggtggagttttgctcttgttgcctaggctagagtgcagtggcacgatctcggctcactgcaaactctgccttctggttttaagcgattctcttgcctcagcctcccaagtagctgggattacaggtgcccaccgccacacctggctaatttttgtatttttagtagaaatggagtttcaccatgttggccaggctggtctcgaactcctgacctcgtgatcctccgcctctgcctcccaaagtgctgggattacaggcatgagccactgcacccagccttaaccatttttaagagcacgatttgtggtatgagctacatgcacatggttatgttatcatcaataccacccatccatagaacccttctcctctggcaaaactgacactctgtacccattcaccacaactccccatttctctcgccccccagcacttggcaaccacccttctactttccatgtatggatttgagtactctaagtaccacatataagtagaatcacacagtaattgtccttccatgtctggcttattttgcttagcatggcctcctcaagattcattcatgttgcagcctgtgacagatttccttcctttttacggctgtatagtattctattgtatgcatatcccgaattttctttatccaattcatctgctgatggtgtgtccttttggctgtttcagtacacacttgaataaatgaatgacgacaaggagggtggatctctgcctcccttcccctgcacaagacaggagtggcagctttgaacccatgaaggccattcattcatggattgtatcctatgctactggctctccagaggccagcgggacctctttctgcagtaatgtgctgtgctatggggtctggaccttggccaagatactgagcatttctgagggagggttttggcgtcaggaatgggcctctgctcagaccttaagccactgggtagctactgtgtaccctgagggggtcacagccctttccacagcacctggagcagaggcaccctggtatagctccctctcctaaccctgcaaggcaagctgtgccacagccctggccgcacagcggcctgtgtgagcccagtgctctgccatccgggaaggaggtgagggaaggggagggtgtgaccccacagtgcctggagctcatgctgggagtgagtgagcacaaacaggcaccagcgccccgtgaaaaatgtgtcaccgcccacgacaagatacgctgcgtggtttctgtaggaaactgaaattccagaaaacaacccctgtggtccagtgtgttttactggaagttcagacctccccttcaagcttgccttgtgccttttagaaacagaatctctgtctcactccccaacccagcctaggttaatgctgagaccagggcaaagaggaggacttggcgataaggcttggggctgggaagatgctgtgattcactttgatgtcttggaggggcaggttgtgaggatggaatgaggaaggggaagaccccagctcgaacgccaagcttcggtgggcctggtgggctggccaagtgtcatagctgctgcctgcatggggtcctgtgtgccacgccaggcacagggcaggtgctggccaagtggatctcccccgccactctggcagttcataaactgggacctggggcgaggggtctgcattgagctgggaacacaaacctcaaggcccgacttgtccagatgtcacttggtggtatggactctgcaggggttcgtgagggctgtggggttcttgatggtggttgggagagctgggaaggcacggagcagcatggagggatggagatatggtcttgggggaagctggtatgctggacagaagcagcaaatgtcgtgagtgcagagtagagcagcgcttgggagggcctgggcaccgatgcccatcgacacctaggcagagatggtgtggaccctgagatcaacagggagaagaggcatggggagctttggctttgggggtgcaggtgcagagagggattccaggcaggagtgtgctcatcccattcccacctgagaatgtccagaggcgatgaggattgtcacacccaccccataaaggggggcccctccaggcctcctggggctttctcccttccctggcacctggaagacccagatacccatgacccagggccctgggggactgctgcagacccactccctgcagcaggatgtcccctgcaacatggtgctgttgaccaagccaagtctccaaacatagacataaaagaaaggaatgaccgggcacggtagctcacgcctgtaatcccagcactttgggaggccgaggcaggtggatcacgaggtcaggaggtcgagaccatcctggctaacatggtgaaaccccatctctactaaaagcacaaaaaattagccgggcgtggtggtgggcctgtagtcccagttactcaggaggctgaggcaggaggatggcatgaacccagaaggcggagcttgcagtgagccgagatcgtgccactgcactccagcctgggcaacagagtgagactccatctcaaaaaaaaagagaggaagaggaacatggcaggagtccccagcctgctgcaggctttatcacacctctgcttgcccattagttaccaggaaaaatcttcctcctcaaagggagagcattacaagccaatacacctggatccctattctatttctggggtgcccaacaacccttggctgatagaggcacattccccaaagggtatttggtagttctcaattaatggaatgaagccatgcacaggtgtacccattccacacctgggtattccacacctgggcaccctgctcctctggggacgctcagcctggcttacagctcccaccgcccacctgcctatgtccatcatgggtgtgataggagagggcacctcagagccagccagggatgccagaggtggatggtgcctgtcctggaatctcggtgcaggttgtagaggggatagagtgaagtcagcttcacccagactgtccccagcccacccccacatcttccccacatgctattcactgctagaaacataatatttagctgacggcaaggaagccagagaaatcagcagcaacagtggtctccagggggagagatgtaaccaaaaaacaaagtgtacgagttagagtcaattccagagcctgtggctgcttcaagctgccgtggacagcctcctcccaggtgagtcctgagggaggggtttggggaggaggctgtgcgattccagggggagcaggaggctttctgtctgccatcttccctatgatttttggcttgttggtactagtttctttagctacacccttttttgaggaagggaggcttagaataaatttctaatttttgaatagtgttagatttgcagaaaagttgcaagaagagtccaaatcttcttatactccatgcccagcttcccctgttgttaatatcactgtggtactaatatcacaacacatgaagcaatgttgatgttatcattaaccaaagcttatactttactcagatttccttagtttttacctaatgtcctttggtctaggatctcatccataataccacattacatttagtttttttttttttttaattaataaactttgttttttaagagaagtttcagatttacagaaacattgagtggaaagtacaaggggtggccatatgcctccgaccccacacctcccccactaatggacaacctgtgatagtttcttagactttccttgtttttgatgacctcaagacagtctttgaggagtcctggacgggtattttgtagactgtcttttttttttttttttttgagatggagtctcgctctatcgcccaggctggagtgcagtggtgtggtctcggctcactgcagcctccacctccctggttcaagcaattctcctgcctcagtctcctgagtagctgggattataggtgcatgccaccacgtccagctactctttttgtatttttagtagagatggggtttcaccatgttgtccaaactggtctcaaactcctgacctcagacaatctgcctgcctcagcttaccaaagtgctgggagtacaggcatgagccactgcgcccggccttttttttttttttttagagattgggtctcgctatgttgcccaggcttatctcaaacacctgggctcaagcaatcctcccacctcgtcctcccaaagtgctgggattacaggtgtacgccaccaggcctggcttagaccgtttatcagatgttcttctcatggttagactggagttatgggaggaagtttgtgaggaaggccagggagataaaggaccattctcatcacatcgtgtcctattaatctggcttatcactgataatgttgatcttggtcacctggctgaggtagtgtctgtcaggtttctacgcaggaaagccacagctgttttaaagataattaacaggcaggacaagctaaataatttatagagctcagtgcaaaatgcaaatgtggggcccactgttcagtcacaaagaatttcaaggcagaaatagaacattaaaccaaattcagggtgcttttaggcaggggctcctgggtgacgtgcacaggtcgcagtcccatgagactggtcttgtttgcagggcaattgtcagatcacccagatgcccctagagctctttctgcatggagagagaaggcctgtgccagctgtccttgatccctggacagttggaaggggcagatggctgaggaggatcctaggtacccatagccatgtgggcaaaacagtatcacgggcagaggatgtcatgaacatcacaggtgtctgcagaggccctgctgaggcacctgcctggtaacatgaaaaacttgaccggaggtctgcctggatagagagagaatggttgggtgtgtgcaggagccagtggttagtaacaaacagcagcaactctgtaatttttttttaaatgctacttttatttttaagtttttttaaaattattttcttctttttctcagtgctcaaagcagcattttttttttctggaacaccttagaatagcttatttaccaaatgctacatgagcctttatgctgggcaaaccgaggagctccattagagggggacacctggccttgaccgcccccatccctacagctttcttgttaggagaggagggcatcgcgctacctggtctcaggtgcatacctgcggaagcagagtcctcacgatagcagggagaagagtgtagggagaagagtgtacagctgccaaccggcttctccttgctattattcacccagctgtttagagaaggagagagtatttctaatcagccatatggcatggagttttatttgccttggtaagttaaaatgtacattattggtcagcatcttgcatgcaaattttgacattgcattccaggagtacctgcggaagagagtggcggcaggtcggatctgtgtaattacattgctttgtaggcttgtaacattgccatcactaacgatgcccggtatctcactgcgacggctgcctggggatattgccgtgagactcccgtagccagagaaagattatgtaaacatgtgtgatctcaaaagtgagtaatgaagttgagtacttgttgcaaaaattaataaatggctggtttacacgtgatggaggagtcccttgtgtgaaaactgagtcacccagtgtagtgatggataaacgcacttcgaggcacaggtgacttaaagaaattcatccttttctctactgatgtgatcaaatggacaattgcagtccacacctttcactccctacttgactaatatgaaatcatcacgaatatatctttctcctgctcttggcctgtcagaatcttaactcttgcttcaaaggatggcatgtcagctctatggggttacctgcagtttctggaatggtctatgttgtccaatgctgcaaggaagtgctccaaggtggccttggaccgatctgattctgccccctttctcacttgtagttctcaagaataagggtagaggccgggtgaggtggctcacacctgtaatcccagcaccttgggaagctgaggtgggcagatcacctgaggtcaggagttcgagaccagcctggccaacatggtgtaaaccgatctctactaagaatacaaaaaaaaaaaaaaaaaaattagccgggcgtggtggcacacacctatagttcctgctacttgggaggctaagccaggagaactgcttgaacccaggaggtggaggttgcagtgagccaagatcatgtcactgcactccagcctgggtgacagagtgagactccatctcataataataatagtaataataataataataatggtagaatgttctggggatataacatcttgagattagggggagctggccaaaacaccctggcctctgatacagttccccctagaaattagatatcctttggtgttttagcccagcgtgtcccatggccccagagtatgcaaccctgggggctgcttttccaagaccctcagttgtagtgcaagtggcttatacagacaagactacatccaccccaggaagctttcttgagccttaggggacccacttgcaataaatcttaggcttctgtccaccttgctgcctatctgtaagtaacaaatctgcttcacataacctgttgcatgtattctgtgtcattgaacttggacaggctggcacccatcctcacacatgcctccaggcctttacacatgcaatttgttcactcatatccttggagccgctacaatgtatcctgaagttattactcacctactaaatgtcctttgagtcacagctcaagtgccacctgctcagaggagacgtcccgcccatcctgtctggaaaattaaccccctgcccttctggcccatccttccttgatgatgcttacctttctgttttagctgtctctcctccagggatgaatgttcgtgaaatcaaactgaccagggtccagatctcagttccaccaggcaccagcttgtgtggccttcagcaagatactttctgaacctcaaatgtgctgtctgtacaatgggaaaacactagtttctagtttgtaaagctgttaggatgagatgatgtgcctggcccatagtagctgctcagtgaatatttgttccgacatggatgaaggaagtgagacttttgtgatgtctgactatttttagactggagaggaagagggaggcatatgggaaagaaggcatggcagagacaaaggtgaagcacattggtgagctaggtgtgtttagtggatgttgacgccatgtggttgggaatgtgctgggaaccctggaaaaggagactagggccagactgtggaaggccttggacgccaggcaaggatgacatcctgcaagctgggaccagctagaggctcataaaccctctttctctctctctctctctctgtgtgtgtgtgtgtgaaatgattagggggtttatagcatggctaccctgtgagcactgtgtagggctccatattgttatctgggtcttgttcctcacgttttccactccctcagacacccgcccttttccccacctcctccagcagacatttgtggacctcctgggtcccagacagcagtgtggccgggtcctgtgtgaactcccccaacccctccccatcactctgtcggggtgaaagcactgatgtgttgtcaagggaggatattacacgaagcccctgaagtggtacattaaagcagtttggattttctcttactgctaacattgattactattaattaaggttgatatttacaatcagagggagtacaggagcagatcattttttattaatcactattctggattcatcatcagtcatcattatcaaaatattcagacagtggacagtggctgagttttaaaactcaagtaaatgataaaattaaactacattagagagtatatgttctctgtgacctctgtctttcctagttttccctcttgtcccccaatggtctcagcctcctgctgtgcattctccccccacatcccccctttcctctctcctacctgtcccttcccttcctctctctctcctttcttccttttcttcactataaacagcactaccctataattctgcagtttgcttttttctttcaaccatgtggcttcaagataaccttatttttgcgttattgttgttgtttggttttttattttgagatcaagtcttgctctgtcacccaggctggagtgcagtggcacaatctcagctcactgcaaccttcgtctcccaggttcaagcgattctcctgcctcagcctcccgagtagctgggattacaggcatgcaccatcatgcccggataattttttgtagttttagtagagacagggtttgactcagatttctcttagccctgttcctgtccgtgtaacatagccactggtcatggtggctcacgtctataatcccagcactttgaaaagctgagagggaggattctttgagaccaggagttcaagaacaagcctggacaacatagtaagaccctatctctagcaaaaaaattaaaaaatataagaagaagtataacaggccataaaatagatatggcctggtattttgtatgtatttttagccattccccaattggcgggcatttaagttattccctcccctttcttcccactgctgccatagtcagtgccacagtaggcatcttgtctgtgtcttggagcaggcaggaaagcagtctctggggtaggcatgaagaaacgggggtacagccacagcccactgggctccccagccccttctccatgtccttcctggactctagccaaacccaaccccacacgagccccagacatggccccgtgtactggctctgctgtgctttaggaccagccgctcctggaatgcttgatgaggggtccccctttctcccctgtctccccatgttcagttcctgcccacatctaaaggtatggggaggtgcctgctcctccagggacttaaggttacctgctttctcctatgaagctcacccaggaacttgtcactgtagagtgaaatgcattggtagctttgttctgatgatttttgagccccatgaagacggcaacggagtcgaactcatttgtctctccccgggtcattacacatgactaccaagggctcgtcttctgaagaacaaatgcggctgttggttttcccacgtgttagtaagagagtgagtggttcttgacattcttcagccttttcctccctggggttagggctggggactggggcttctcccaccttcttccctctgtggccccagtcatcatccactccccagcgcacctgggacccctgaattcgctcttactgagctacatgaagacttttggccagccgtggtgttaatccgtggactctggccattagcatcctggcatttggaatgagaaaagtgaaatttaggggatcctggtcttccttttaggagtctttttttaagtaggtaaacaattgtaggtaatttaatttgtctgttaatggcgcacatggatttactaagagggaaatgtcactgggttgtggacacacactgcatataattcgatgagaatcggcctctgatgggcagcaataaatgtcaaactgttcaacattgattgttcgtgaaggaatattgcttaacaatgaataaaatacctttctgagtttcctctattggcctgactttaaaaggaaatagggagatggactccctctgtggctcacggccgcttaggcttggaggcagggaagctgctgggaaatagactgctgggcttctgttctcaaacaggtccattttagtggctcctcaagcccgcctcccagagcagagggatgaatgcttagaggccctagtggctccccatgtgatttgcgaacttctccggtctcactgggcctgcctgcctcttggactccagggcctgtggctctgtggcacccactactctcctgctctttctgtcactcctcagaatgctccagtgtggtcctgccttggggcctttgcacttcctatacttgctgggtttttttttttaatagagatggggtcttgctatgttgtccaggctgtactgaaactcctggcctcaaatgatccttctgccttggcctcccaaactactgggattacaggcatgagccatggtaactagcctatattttctttgttaaggtccacttgtctttacttttccctgaccacccatccaatgtcaaagctcatcttggttgtgcccttattctgtctgtcccgaatcatgacatcacccttatgtatttaactatttggtattcttttatttccattgtactgacacgttctccatctccccactagaatgcaggttctatgagggcaggaatggtgtctgttttgtccagttaggtagcccagggcctagagtagctcatgatacaggaatgatatacattcttcatgatattcatacacagcagtaagtactgatggacccagtgtgttgaatgaatttctgcggagtcgtatgacatgcatgcattttatgaaacagcaacctcccaagacatgaaaaaaatatgcttgaggtttctttcaaatgaatctccctttaagcagaaatttctgctttgtggcgtgaagaaagcagagtattccagcagtggttggttccttctactttttagacaacccagtaatttgtttggagtgttgttgggtcagggggttctcactgacaggggctgtgtctgtcccctctggaaactgaaatctcctccactgtgctttgctgaagacagcagtggctgggcacaatgatggcaaactcttgagcttatcagaagaataaaaggacttaagtgaagtggagatttcttggtagttatcaccttctagaataaaaagaaaacctgattctttccttcatctcaggggatcctctattgttataagtgacctcggtgagggaagagagttttcttactctacagaaataaaaatctgtctgctttctctagcactgaagaaaaatagtccttttttcctttttctttttagaaaagcaccttgcagcttctgatgattgaggacggggtgggatcctccattgcccaaccccttagctccaccactctgcagacctcggcgtccttgaaggagctcgggaacagagatcagcatgtgtgggtcaggctgctgatggctcacatttaagaaagatggttcatggataatccttggtgtttttttttttttttttccaggataaagttttatgtttgaccctgagaaccagatattaagaaatatatgctatgaagtcattttggctgatttaatctaaacttcctgtatgctcttaggcagaggtttcaaggttgggagggtcttacgatctaactctgccccacgcggggttgaggaatgctgtggggctccgccagcttctatttgtataagtccggggtagggggcttcctgctgtctcttgagggggcccattcagagcctgaggagctctgatcttagaaagcctttcagatggggggatcctagtgaagctcatgggttttgggctcagtcaggcatggtctgagtctcagctctgtacacataaactgctggatccccagccaagtctgatcccttatgtgtataccggggaataatagtacttaccttagatgactattgtgagaattaaatgatgattatcttccttctaaacaacagcagagcacatagcaggcactcagtaaatgctctctctctttttaatattgccctgaaatgtgcatggtcccaggattccttggggtcctgtaagtcgaactggattctcccaaggccaagggacaaaatgtggtatagcttcgagtcttgagccttgtctgcttttcttattctgtgcccatctgaaccaatgcacttagtgcacaggacctgctgggttgaccaacgatgcatcatctgtgtaggctcagaggggctccctctccttttggaaactcatccttccgaggccatttttgcctgtctggggaccacggattctctggttcccactgagttactcatcactgtccaatccctcaagtcctttctcagaggcctggtgaagccctgccctctccccagtcctgcattgccactctgggattgtgtatcccatatcagttaggacaacactgaccgctcttataaatacaccctaacatctcagtatcaagacaccacagtttacttttctctctctcatccggagctcaatcggtgttgggcacaagcagcttttatttagggaccaggccagtggaagcctcatcattttcagtatacagtttcctgggtcacccaggacattgagatccagctgtcaggaaaagagagcaccatgagaatggagcaagagactcttctaagaagtagcagccttcattttgtccaaattccaccggctgaaagtcagtcacgtggccccagctaaatcagataagcctggaaaatatctgcggttgggaaactgcttccagcaacgaccctaggtcgtggaaggagacaggaattgctagttggctgctgtttcgactacagaccagatgtggaaaaggtcaacaactgtttgtttaattgcatcactcattttccccttggcctggtgggtcagggtgctgtgagggattccttcattcaggggccctcacgcacaccccacttccccagcactggccacctgcgcttgttccattcatgcctgttgggtttttgtccctgtcactgataaaaagcagtccacgaggcagcctcgggacatgtgccctgccacatcccagggtgagagtccctcccttccttgtgacctcagcacttgtttctgtaccctttgggtatggctggttaaccagccactgatccacttctttgccttgcttcagtttcacatttctcttttttatctccgtggaaatcaaaatgccctgctgagatgcagacacctgatgtctaatgcaggtctcggtccccagccttcagggctggttccaagggagcccgcgctgggctctggggattgctgttcccccttctaggcttgcctcaacttttgtgaaaaagtaagacccatgctgaagtcagtctcaggatcgattgtccatgacaattagctttccctttctccacagttcctcagatatcacagcagcaggtttcagcactgctttcccaagctctcccggttccatggtgccaatttcacgggagtgtggagatgaggattctgctggagcagacatgttcttcctgacagtctttgtcatccatctcaggctcccgtgggtcaacaggtctctcttccttccccgggacctctccttgcagggcagacagaacaatcccttctcctcttctccttccccaacgtgatgtcattgcttcctgcaccaaactatagttcctttctcagtctgtttgttttgctctgaattgaacttttaaaaagggttttttaccatcattctcagcaaactaatacaggaacagaaaaccaaacaccggatgttctcactcataagtgggagttgaacaatgagaacacatggacacagggaggggaacatcacacaccggggcctgtcgtggggtagggggcaaggggagggagagcgttaggacaaatacctaatgcatgcagggcttaaaacctagatgacggattgataggtgcagcaaaccaccatggcacatgtatacctatgtaacaaacctgcacgttctgcacatgtatcccagaacttaaagtaaaataaaaataaataaataaataaataataaatggctttttagcctgggcacagtggctcatgcctgtaatcccaccactttgggaggccgaggcaggcagatcacctaaggtcagaagttcaagaccagcctggccaacatggcgaaacaccatctctaccaaaactacaaaaattagctgggcatggtggatgcggctgtaattccagatacttgggaggctgaggcaggagagtcgcccgggaggcggaggctgcagtgagccgagttcatgtcactggactccagcctgggcaacagagttagaccctgtctcaaaaaaaaaaaaaaaagggtgggttggggggctttttagctgcccttaatactatattttttctttccttggctttcattaaagataagatcatttcaagtcccagtcacttatgtctgaggttccctaagaacatgttccttcttgtttccatgttttattcaaatcatcaatcaattaatctattcacttaacacatctatgcatatgtgcatgtgtgtgtatacatgtacttgtatgtacatacatgcgcatgagtatgctagatgcccactatcgtcttttcaaatctcatctctctgggggagtcacactggtttttctggacccaggcttcttccctgtcactgggatctctctggttgcacagtcggcattatgacacgtttgagagcatcctcatctttttctgggtcatttgcttgaccagcctctcgtgtcctggaatcctacctctcttttctgcaagtattttgaaccctggtatgttaaaatttaggatacacattggttcgtgatgaattacaaacatttattgagtttttaaaaaatgccaggcagtgtgctaacttattaaatggatttaatccttgtaacaactttttagaattgagttctttttaaaaattttgttgattgatttattttcattttttatttctatagtttttggggaacgggtggcttttggtaacatgggtaagttgtttagtggtgatttctgaaattgtggtgcacccatcaccccagcagtgtacactgtatccaatatgtagtcttttatccctcacccctcccgccctcaccacctccccaaagtccatcgtatcattcttacacctttgcctcctcataacttagctcccactgataagtgacaatatacgatatttggttttccattcctgagttacttcccatagaataatggcctccaacttcatccaagttgttgcaaaagacatttgttccttttgatgactgagtagtattccatggtgtatatgtaccacattacctttatactttcgttgatcagtgggtacttaggttgattccatatctttgcaattgcaaattgtgctgctataaatgtgtgtgaatgtgtgtgtgtgtgtgtattgtgtgtctttttcatgtaatgacgtcttttcctttgggtagatatccagtattgggactgctaggtcgaatggtagatccactttcagttctttaaggaatcttctgttttccacagtggttgtactagttctcgtaacaggtaacagctttctgaggtagatactgattttatcctgcagtagaaaatggggatctgaggttctgaaatgttaagtaacttccccaatgtcacacaggaagtgctggagtctggatttgagccggtctgttttattccttctctgtgctcctaaccattgtcccatcactgtgaccccaacctacctagcctcacacacctaggattttgagaactctaagacaaacataattgtagttgtccaagattcttgcttttttttttctgccttaactaattcctccctattagttagaactaaatctagagttttaaaaatattccttcattatattctctacggtctggaaaatgaagttatcatcaagataggtcaaggtcttgtcagatgaatgaaaacaacagtaatgatgtattttcctccccattaggtctgatgcctcgctttccagccagctcaaagttctaatggacggtcagagtgaaatgttctatcagtcccttgtccagccccccagctggttgaattgggagttttgtgtttgcaggggaccctctatttccccatctgtctgggtgggcttcagcaagcttctagtatcagcatctccatagcgccctcctctgggtccaccccttgcttggtgctgtatgcttcttgctttgggcagacaggagcctggggacaccactccttcaccatttctgttaggtctggcctttggggtccagaagtcctggggacaggggtgccccatgttctgactcccatcctccaggctccagccccaccctcactgtgaggtttatttagtgttctgtgttggcccagtgcccacctcattggaactggtgacctccttgacaatttgttttctcctgtgcatctccaggctcctcccacactctcttctcctctctgggttgtacctgttgtacactgtgttcctagggtgccaggtcagtgagcaaggtggctccccttggcaggtcagctggcctcccggaaaacatggtcctctccccttctgggaaatgcatcagagtcccagctgggaccttttccaaggcctcaagtttccttcaggtgtcccattggcacctcaaactcagcaggtcccaaatgccgagtcttccgaatgggtgtctcctgccatgctgcctggcggggtgaacagaccccaccccaccccaccccaccccacccatccaacaaccagaacacccagggcatggtccaggcggttccttctcacaccccttggagacccctctttctgcttcttaaacaattcttgcgtttgtccccttgtctgtcacagatctgaatctccacatttgaggtcttcatgggtttccctcttaaacacagtttccgtctagttcgttcccggtagcttgctccaaaccctttcccccagatctctggaaggatctacctaaaagccaacctgatcatgtcacttctcagtttaaagcaacccatgggccttcagaaaaaggccacagtctcatgagaaccttcagggtccagcccttgcccacctctgcagctgtgcctcttggtccccacagtctttgttctggggtgggggtctgactcctgcaagtttccccaccctgtattccatcattcctctgggtctctgtgtgttcagctctctctactggaaatccccctctacctcaccatcccaattctttgccaggctgacttctgccttcctttggaagtcatccccctgaccccaagtctctgttaaacccagcccatccccgctggtgcaccctgccccatcgaatcacaggtgttctctctctcactccctcctacgcctgaccacctggacacactccatatactctgttgaatggatgaatgtatgtcccagaaattcaaattcatcagtgtggggtgttttctctcattttgatttttttttttttttttttgagatggagtctagctctgtcaccagactggagttcagtggtgtgatctcagctcactgcaacctctgcctcctaggttcaagtgattcttctgcctcagcctcccgagtagctgggattacaggcacccaccgtcatgcccagctttttttttttttttttttgtatttttagtagagacagggtttcaccatgttggccaggatggtctcaaactcctgacctcgtgatctgcccaccttggcctcccaaagtgttgggattacaggcgtgagccaccgcatgcagcctgattctttaatatatcaagtaagtgtttcgccccatccttgttctttctctgtgctcttagcccatctctgtgcaggacccatgagcttcttgtttcgtttctttgagcaagtagcgcactttcttttttcttcttcttcttcttcttctttttttttttttgtcttctcttgatcttttttggaaagactgtggaactccgtgtgagagctcttaaattttctgggactcaggaaagtggggggacaacatctcttctttgttataaggattaattactttgtaaagtgctataagctttgtagagtagaaaatcaaaccttgttgccgggcgcggtggctcacgcctgtaatcccagcactttgggaggccgaggagggtggatcaccaggtcaggaaatcaagaccatcctggctaacatggtgaaaccccgtctctactaaaaaatacaaaaaattagtcgggcgtggtggcaggcacctgtagtcccagctactcgggaggctgaggcaggagaatggtgtgaacccggaaggcagagctttcagtgagcagagatcgcgccactgcactccagcctgggcgacagtgtgagactctgtctcaaaaacataaataaataaataaataaatacataaatacataaataaaataaaataaaaaaaggaaatcagaccttgttaaggttccacccctgcacgtttccttcttcccatggtttccttcaagcctctagctatttttttggtaacagctttattgagatataattcacatatcatacagttaatgcaaagtgtagaattcaatggtttttagtctattcatagaattgtgcaaccatcaccacaatcaattttagaacatttctatcatcccagaaaagatactctgcaacctttagctagcaactcccagcccaagacaaccgcacatctctttcctgtcactatagatttactgattctggacgtctacttgctgttcttaaagctcatctctgtgcaggacccatgagcttcttgtttcatttccttgagcaagcagtggatctttttttcttctttttttttttgtcttttcttggccttttagcaaagactgtggaattccgtgtaaaggctcttaacttttcttgaactcaggaagcaggcggtggggtggggggaaacatcttttctttgttataaggattaattactgtgtttgtaaagtgctataagctttgtaaagtagaaaatcaaacttttgttgattttctaattgttccaaattaatgtcattttctcaggtttttttcttaatttgggatacctcattagcaaaaaatatcaaatttcagagaaagatgttctaagcctgcttttatcatatctccaacctggagaacccatagcaagggaagatgagctcagagaggctgtggaagttgctccgagaccagtaaaggtgtgtttcattaggtgggggttggcgtcactattatccatcaggaaagggagagggtgctcagtctgccagtgacacatgtattttctttctttttttttctttttaaaatttattttgtttaagttccgggatacatgtgcaggatgtgcaggtttgttacataggtaaacatgtgccatggtgctttgctgcacctatcaacctatcacctaggtattaagcccagcatgcattagctatttattctgatgctctccctcccaacctccccgctgacaagccccagtgtgtgttgttcccctccctgtgtccatgtgttcttatcgttcagctcccacttaaaagtgagaacatgcagtgtttggctttctgttcctgcattagtttgctaagggtaatggcatccagctccatccatgtccatgcaaagaacatgacctcattcctttttatggctgcatagtattccatggtatacatgtaccacattttctttatccagtctatcattgatgggcatttaggttgattccatgtctttgctattgtgaatagtgctgcagtgaacatacatgtgcatgtatctttataatagaatgatttatattcctttgggtatatacctagtaatgagattgctgggtcaaatggtacttctggttctaggtctttgaggattctccacactgacttcctcaatgggtggactaattgacattcccaccaatggtgtaaaaacgttcctatttctccacagccttgacagcatctgttgtttcttaacttcttacatgtattttctataataactcatctcatctgtttttggcctacttggacttggtcctagtactccacaaacatttccttggctcagataaagggcaaatgctgataattcacctaaggagggaataaaactactaagtagaaggaacacagttcatctgctctagtatttaaaaattacaaacttaaataaagaaccagtggccattttggtctattgaatgataacaaatattaaaaactgaaactcctgcctgccagggatacagggagccaggacttccaacaatgctggtagccttctaagtggttgaaagatctgtagaagacaatttgtcaatacccatcaggagtaatgacacgttaaactcgttgacccagtaattctgcttctgagaatctattttaagaaatttatccaaagtatgaaaaaagttacctgcgtggaaatgttcattataacatcgtttaaaatgccaaaaattaaaacaggaattgtgttaaaatgtatggcactggggcattccatggagacagagctccttgatggacatgatgcagccatttacaatgatggttttcaggagtgtgcacaagaacaaaagaaggaaacacaactgaatgtggaccaggggccgggccatgtgaaaagctgtgcacagtaaagcaatgggagggagaaatgccaaaataattactgcaggggctttaaggcatagaactgatgccttctcagtctctctctctttctctctctctccctccattcctccctctttctttttcttttgtccatatgttttatgatgtatgacattacttccataaaattttttaagaaaattagaaaactcaaccccctggtgcatgttaagaaggtcaaacttactgttttgttcttcaaaaacctgaagtcctgaagtgaggaccaaagagatagtagtaaactagcataatgatcacattccctggcattctatagaaaatgacaatttcccccattccctgaaacaaatcttgactaactttgatagttcagcaattagaactttggcatacaatctttcttcttcaactcctataattagtggtctccaattatatgaatcaatttcaatttctataaatcagatgatttagagagaaggctgttcaatttccttttcaactgtatggtttcagcagcaataaaactctcagcttaaaatatcaggatgcaacttgctccagaaatattacccagctcatttagggcttctgccggccgccacagcagttcccaggtttctaggtggtaccacttatctgtctgctcctgagccctgttcaattcttcttcatgggatctgacatctacttacagatttccctcccagtgtgggatgactatccctagaccttcctggtgttctaacagaaagacccagtttggacccagatgtatctctctaatgctagttagcaggcacttttagtgtctccctttttttcagtcctgggtttttcaatgtcagtggccctctaaggtgttctgcaggatgtgaaacctccagcctgaatctcctctaagcctggcttcgggaagtgcccgttgcaccctgctactttgtgaggactcttcatgaatcaattcctgactcattcccggaatctggagttgtggtttctttttctcctttagtcctttaatgtctgaaatgtgatttctttcatctcacaaggagcaagtcttattattaattttaaaaattcaaaaaggaaaattatttagctatttttttaattaaaaaaaaaaaacaaccctgagagtctcaacagactcttctgagcatcgaatcacatagacactttcatgtggcattaactcttccccattcgctaaaaggaaagcaagccaggggcagagggcgggttgaggggtcagctggaggaatctgtgccgaagagagttctgggttgcaaatgcacagcctccctcccctttcttctccccttggaggagataagtggccaaggcttcagtttgatgctaatgtggtttttagcaagatgtctgcttttggttgaagattggcctatggcttttatagtattcttaaattcagcttatgttgaattattattgttcctcattttgtgcatgacttccagttcccgaagcattagagtctctttaagtgctagggctgctgactgaggtttcttgacaaatagatcatggaaaatcaggacgttatatactggcctgcccaaggtatctgcaagaccagcccccttgtggaatcactggggcagagaacccacagctcaagctctcttttgatacctggggctctaaagaaatgtgtcagcaagtcttccaaacccaaaggggacaaggcttatctttcctggggagctcaattcaacagggaacagaaaacaaaagacagaaaccagccatttgtgacttgtttatttgattgtagccattaacaatcatgcattgaagaataacagtttcaaaacatactcacaagctgaggtgtggtgctcaggcttgcagtcccaacactttgggaggccgaggagggaggattccttgagaccaggagttcaataccagcctgggtaacatagcaagaccccatctctacaaaaaatttttaaaaattagcgaggtgtggtggtgcatgtatgtagtaccagctgctagggaaggtgaggtgggaggatcgcttgagcccgggaggtccagaatgcagtgagctatgattgtgccactgcactccagcctgggcaacagagtgagactcggtctctaaaaatgaaagtaaaaataaggaaaataaaataataaaaacgtacaatataatgttgagaaaaaataaaatataaaactgtatgtaacttgttttgtttatattcgaataatactttaatcagatttaaataaatatgattagaaagaagtctataaaagtgatactgacagtcgtcgtcaggtagtagaatctgaagttattttcatttcttttcatacctttccatatgttccagatttctgcaaatacaaacatggaatactttgctgaatagaatgtgaaagtttgctgaaaaggctgaagaagtaaaacaaattctgaatttccaatatggtacttggtcatagattgctctgacctgatttgcaagttctcaaagggtgcacactctgttcttgtctgagtcctaccagggccaagcatgtgcttcaaacctacatgcttccattgagatcctcctatgtacctaatgcatatttcaattgagtttggttttggaggatctgacttagtccaagttcatgtgaacctgcagagaaaagtgcacatgattggaggataaaagccattgctaacttttttttttaaccaagttgaccagttgttagaccagaaaacagttttgttgttgaataaacataatctcttcgttcatctcttcttgataagccctagaatggtgagatgactccctgtggctagcaatagaagatcctattaggcaagttttcttcaatcaggatgaaagagtcatacatattcaaaatgaacattttagaatatatagaccctttcatctccaggagggggttgtgtatccttgtttagatcttcattttacagatgagaacacaggggtctgaggaggaaaggggccagctcacatcccttgctgaactggcagtggatacagaatgtgaaccactgagtttttagggtcactgtaggctcccccttgccacagagataacagcgttcaccacttagataaagaaacttccatgctggccagcagtgggcattttcttccttctcccactcactcttcctgtaagcagaaataaggccctattgttatccaaagggcactctctcctaagtatgtcctagggcaccccaagatgatgatgttgtttgctagggtccactaccaggaaatgtcaagtattcgggattgcccacgaaagagtttattttggtataagaaaagatgggcttttaaaacttaaagtgaaaactttgggtttggaagggaaaatgtaaaagttggttataatgaggactttgtttgccaggcgccccagcccggtgactaatggctggctgcttgttggagaaagctgtctttaggggcgttgagggtgttagcaatgaacaggagtgggcaggcactgaggacccgggacccaggttaggaggcgggggaaggtggggtgaatgtgcaactccaatgagaaagtatttaactatggctccagtgtctaccaaggcctgtccaaggaccttggttgatgtcgctagagacaatgttgcctatcttcatgaaaacaaacggcaagtcctatcctgactcaaggagcagggtgttttggataattacaattttactccccataaactcctttaaaatggcatctaagagaagcgactttcagaaagaaaagaattctggggacattgttcctttcacagcacaaggtgaacaaaataagacagaaggccttctgtctcctgttcagtaaatttttctgggttaagattgttcttccaagtttgtcttcctggagtgcgtgagcctctgcagccaatgacaccacagtgtgtgttgtggggagttccagagtccctctccagttatcaggtcgatacatgtacctggtaatacaatgccaatccatggctaaaaatagcttccttttgttgcgatctcccagaacaaagggatcagacccacttcatctgtgtcccctgccctcccctcccggcagtcctaaggcaaacagtttgtcttttccctcaaatggatttttcatttaaaaatgggggagaatgaaacctgaatagcatggagacctgtgcactaacaaaaaattcttttgaaataataggtgctagaaatcacaatttcagcctcctgtgtcccccaagccagtttgggttgaaccagatgccaggacttaagtcaaatgtgtggggactcctctgtgggtcccttgggggaaactcaatgatttcttttcctttccttttcttttttttttttaagtgttcctcaaagatatacaagacgttactcctgataaaatcccgttagccatagttcaactttatattccttgatcagtcttgtgttttctcactgacttttgctacagtttatggctctagattaagtaccagaacacagagttttattttcctttgtctaagtctatcttcctttgcctggctcactaactggatatatgtacataggcgatgggcacagaatgtgggttgtattttgggtgagggtgggggtgggcaggtcggatcatgaagggacacagaatattaattagacagaaagtgctctctgtgccttatctgcataaagaaagataaagcccatgtaaataatatgtgtgtttcccataatgaatgtcccctttctctccatttctgcatagtattagaaattgcgtttttattatatgagacattggatgcatgccaacaagtttttcttttaacttgatattttgggctctgatctttgttagcactacaatggcatgtatctcgtacagtcagaggtcatttctatagctccttcccccttcccatcatttctggggaatgtttgttttcaaaacaaagaattgggttaaagctgaggtatcatatatcagaacatatttcaagacaaaattaagaacactcaaaccttcctttgaaaggtcagatagtatttattattattataaaaatgatctgtgatttatgaatttaacttctcataaaccttctttgtaacagaatatgcagtcagaggcttaacattacattgttttcttttgacaacgtatccacgagaccactgcagctgttcctgtactcacaatagcagattaattaacacaatcatatgctgttggctcttactcaatgagtgggtctgcagcgggatagataggtaaatcctttaaatgcggtggagataaagcatatactatggtagtttcataactagccagttttgcttctgactagccagccctatcaggaccaggttcacagaccacagacgccctgagcttgaatttcaaagtcagccacacctatcgccaacgccataatgcccaacatttgcaagacacaaatatgtaaaagccgaagacctctcggaaatcagcagctttggttaaaatagcagtcagtctgccgccagcattttgagtctgcagtatttttttaaagttcaatcattgctttccttaaatatctctcttgcaatattactcactttttttttttttttttttttttttttgcccatccctcagtgcacatagttctgggcagctgtcatgactttagtttttttaagtactaaaatatttttttttcttctgtaactgtgctaatgaaaacgtgtgtaatgaaaccttcctcccctgcccagtcaccagccatatttattggcaactttagctgacattttagggaacgtcaaacctttgttagagaaaatgtaaggctttgctttagaaacaggcatgcccatgcagagaacgaggtaacaaggcagtaggcttaatagaatttccttcagactttttttctaatgtccattacatatgcaacactaatttactttttgttgttttacttagcacagaaattgaaaatgtgacaagctttgctggattaaaaggctcatttcatagacacatagaccaagagaaagaagaaaaacaaatccataatttggaaccgtttagggcatccaggtagtagaaattcagtcttccccatcactcggggcatttgtcgtgggcctgagatttctctggaactgtctctgtcctttagaagtagataaaagtttggccatgtttggtcacagaagtcttgagtgctttggggaaaaaaatcgtatcatgatgttgaggtctctcacgttccacttaggggctgttcctcagcaccaggtcctggataagaggttcctgcgggggccagaaaattctagctagtgagcatcagggagatacggtgtgtaaagcatctctgttatgggttgagctcaagttttctagggtgctcctcatacgtggagtgtttgcaactcttccgagaagcacagagagcaatggctgcacagatacaaggcagcagggtggctactaaaataacaacaatagttaaaatattaatagcaacctgacctttcttctcaaccctgcccctgtttgcccatccctctcattcagctattttactaaaataataataaaacttccttaaaaaaaggttcagaacatgtgaataattagttatatgtagaaacattgcttagaaaaacctgaatacttgattctgagatcagaacagaattgacttggaaatctgcacagacagacaaggcagacagagacaaggtagggggaccgtaggcccctgggatgagaagttatgactggttcgttacagctaaggtcagtgtcccgacaagtggacactttgcactacgggaacagctattgccagaagcactgggctccttgcaaagttgcaggcgtcttgcttcgacttcactccgccattccttttacaacttgcattttgaaggcacctggtaaggctgggatgaatctgctgtctgaagggtgcgacaatggacttaaccagacttccaatgtgcaggcagtggcgatgcttctgacccagctcacgtggactttgggctcagtttctagtactgggtcagctctatgggtgccccatcctgtcatccctccttccttccatctaacctatggctcaagaacaggacccaaggacattgctccaaattaatgtccggggcctttttgagggtatttcagaacttaagaccctgtaatctcagcactttgggaggctaaggtgggcagatcacttaaggtcaggagttcaagaacagcctggccaacatggtgaaaacccatctctactaaaaatacaaaaatcagccgggggtggtggcgtgcacctataatcccagctgcttgggaggctgaggcaggagaattgcctgaacctgggaggtggaggttgcattgagccaagatcataccactacactccagcctgggcaacagagtgagactccgtctcaaaaaagaaaaaaaaaaaaaaaaaagccccctcagctgttctctatgaagcacatcagattggtctttgtgaatatttccaagattacacattatggccaaaagcctaactgtgagttaggctaagagtcagcagacccaggtcttggcttcactattgctgtggtattgggacaccaagtaaaccttgtaaacactacctttcacatagtacattacttaactggccttacccatttgtgatgcctcctcatagaaagatgtgagaatgcagtgagatgttggctataaggtataggctgagctgcgtgagaccctgcaagtgaagactccagtgccagagcaaaggacaggctaaggtccaggaagaaaaggaagtcttgtgtgcttgtggtgtctctgagcttgcagcagtatctggtactaagtcagcagttaataaatatttgttgaataaatgaatgaacagacaagtgtaggatccttatgctgttctaggaaaggaaaatggggaaggagacctggaaggaggctaagtcagcctctgaacaagcagaggcatgctggtgtttcgaacagagagaaagttgtctacagaatcatagaatcatctgatggagagatagcaggcaaatacaacctcttatacacatggagcgtaggcccacagggcagaagggatttgtccaaggttgcacatccaagacagaacttgggaccagtttaccaactcagtctcagcccagctgttctttatgggggtatctgaagaaaatccttttagccccaagtgtgcagtcaggctgggattcagtgtcaggcagtggttggggtcatggcaaagcaggaagggtgtgactcagagaagaaagacacaacgcagggaaagtcacagcaagagactccagtagaggccggggagggagtccagactttgtagcggatggtttcagtaatgggcagtggatcttatctttgtcagggtagtcaaaagcatcaggattcagttgcaatgataattttgtttcttgcttgtactgcaacagcctccataatgatgccagggtgtattcagtgcctggcacatagtaggtactttacagatatttgttggatgaatgtcttgaaggaatgtccactctccgggcgttcctggggaatctggtctccaggtgtaaggagggcttgagacttgggttgccttttccactgctcctggctctctgtccccataccctgtaccatgcaatgatcctgggccatcctggaagtagctcagtccctacaaactttctgttctgtctctggaataccctctgagttctcgacttgtcaaacttccacccatctcttaacactcagccggattgccagctcttccaggaagctttccttattgaatcagtctccacaagcagacattgtcacttctggggatgccatggtcctttgaaatgttgttttaaggctcttagtgtctcctgcctggggacaaaggagggcatatctaatgatccttctacttgtttgtcctgtcccatgccagagcactgagcagtgagctgagatttaatgagtatcagcagagggaactgcacaaagtaggtctgcagtgaaagtctgttaactgaaggaacaaatgtcttattgcattgctgtcggaattacatatggggaaaggcagcagaggcagttgggggaaggaaatgacattccggaggtaaagcagtagtagagatgggggggtttgggcagcacctgggccttctcaatgcactggatgctcaaggtctccagggatacaggtgagagtgatggtccggggttggcctcgagtagatgctttttatggtgagctagtcgagtaggtgctttttttaatgataagctaggtccacacagctacgaggggcgaggggcactgtgccactattctgtgtaacgtggtgctggcatggcatccttctgtaatagggcacaggtgacagtgtcctgcccccatgcacagcctcagctccagagaaaggggctgggagccctctgggggagcttggctcagcagtgtgatgctctttacaagagagatgattatgggccaaacagcaaggtgctcctccccctctactttgctctccttaaatgccagaggagcgtctgcaggtgctgacacacataccgagagacactggcggccacaatgcccatcggctgtgggtgtgcccctgggtgtgtgtatttaagggccccgtgagcggcttgagtcatcaatgatgctcttgaatggcaaattggtcagagttccacaatggtaatgatcactctgccggtgacctttctagtgcatttacattttatcacaacatgcacaagccacctataggcttcccattggctgggtcattcctcatgcacaataacccagcatgcagggacgcatccagtgtagatgagaaaggggtagcttctgacacatctcactctattgttgcatggtaatctttagcaccaaaggagacctttgagttaagcccatgttttcttcccttttatttttattttaaaaagtgaaggcactccaatgtgacatgcatccctcatgttaacagagccataaagatgaagcattggactcattgctgctcccacacatgtatggaactaaacccacctgagtggcccaaaaggagaaagcaagggggtgccccagggaagtccccggatcctgaattcttcggaactgttgtactttaagatattactttccaaaaagagatcaccttcatgtgtgtgtgaaagactgtgtgagtgtgtttgggtgtgggaacatgagtgtgtgaacgtggggtgtgtgtgtgtgtacattctcacgcttgtcatgcagaaattcagcctgtaagacccaagcaggaccagattccagagacaccctcagaagcctcacttcctgaagtttcagccctgtccccatcagccatatgtaatcaattagccatgtacctccatttgctcatttactcatgaattttgcatcactggagaaatcgcagtcctcttcagcttatagaaaattattaagacagtgtggtgattcctcaaagatctagaaccagaaataccatttgacccagcaatccctttactgggtatatacccaaaggaatataaatcattctatcataaagatacatgtatgtgtatgttcattgcattactattcacaatagcaaagacatggaatcaacacaaatgaccgttaatgatagactgtataaagaaaatgtggcacatatacagcatggaatactatgcagccataaaaaggaaggagattatgttctttgcagggacatggatggagctggaagccattatcctcagcaaactaatgcaggaacagaaaaccaaacaccgcatgttctcacttataagtgggagctgaacagtgagaacacatggacacagggaggggaacaacacacactggggcctgtcagggagtggggtggggggacggagagcattaggaaaaatagctaatgaatactgggcttaatacctaggtgatgggttaacaggtgcagcaaaccaccatggcacatgtttgcctatgtaacaaacctgcacatcctgcacatgtacccccagaattaaaaattaaaaataaaaaaaagtttcaaataaaagtcatagaaacgtcaaaaaatagaaaaaatataactgctgaagacagagaggaatgcattaaataagaggcggagtggctgtcacatccagggctctgggactctcacttggtccttgttgtctgggtgaggtgactgcgtggggacccatttcacagtgggggacaggagctcagggcttttgggtcagtcactcctaggtctgaggctgcagtcctccgggcactctaccgggggcgcaagtaggcagcgagcatgcagcgaggagccgaggagccgttccagcccgtgcgatcctgttcagctgaatcgtcactgctgtttccatttgagcctttaggtgacagtgccaagaataaaaataagcccggctattttcactcttatttggtacttctttttcttctttttttttttttcaaatgccattgaaatagaattctaatttttacttaaaatatgtcatcttaataaattgctacattattgcaagttgcttgatatatttaaagaccacctctttttccagaagagctcatttccaataatataatcacaatcaatagaaaaacattatgtttctatatacagtatctgctcttttttgagggcctatctgttcagataaaagaagtatttatctatttatgtatgtatctatctttgcatctatgtatctatgtgtgtaagtatgaatgtacatatgtatctatgtatgtatctatgtatctgtgtttgtatgaatgtatgtatatgtctatgtatgtatgtatgtatctatctgtgtttgtgtgaacgtatgtcggtatgtatcttctgtgtttgtatctatgtatctgtgtatgtaggtatctatatgtatatctacctatgtatctgtctatgtatccatatagctatctatatttatatgtatatgtgtgtggactcctaggatgtcataattttaaaataatatgactttatattttatcttcaaacatccaaattgtagactttgcatcaaacgtatttacacatgaagtgtcttaatacgtttcaaaataagtttcgtgtgattaccttcttttcctacagcagttgtctggacttctccagacatctgtcctctgttgttagcactccttaacctcaaggccaggaggagaaaggtcttggtgactcatattcctcttagccttggttaactcttatccagcaagggcttggtggaagtccatgttctggtggctgcatgggtcaggggcaagggagggatggtggcagatgaggacgaaatgaagtgttcctccccttggagatgtgtgcaagtctaagtgtgtggccccaccccactcccccacctaccagggacttttaggatccaaagccaagatagcattccctccagaagtactcccaagctcacctttatgccagctctttttaccaaagagggtaattttttctaaataatttcttagattattttaaatcgttcttctgggaacaggtgttttcttgggatgggcttgagttccaactgacatagaaggttcaggagaagctgcttctaatcccagggtaccccagattctagaatttcaccaagatgcagtggatggacttgggtctcacaatcccagtctcactcctggttctagaatctcagcaggatgccatgggatgaatgtgggtctcacaaccctgggctcactcctgtgtctagaatctcagcaagatgcaatggatggatttgagttgcataacttcaggctcactcctggttctagaatctcagcaggatgcagtgggatgggtgtgggtctcacaaccccgggctcattcctgggtctagaatctcagcaagatgcagtggatggacttgagttgcataaccccaggctcactcctggttctagactctcagcagcatgctgtgggatgaatgtgggtctcacacaaccccaggcttgctcctggttctagactctcagcagcatgctgtgggatgaatgtgggtctcacacaaccccaggcttgctcctggttctagaatctcagcaggaggctgtgggatgaatgtgggtctcacaaccccaggcttgctcctggttctagaatctcagcaggatgatgtgggatggacatgagtcttgcaagccaaggcttctcttggtctttaaatctcagtgaaatacagtgggattggtgtcagaggcaagggccacgagttcttatcccagcagtgctacctcctggctttctcattcagacccatgctttcttcgtcagtacaataggagtgtaccaagctctcttccaggctccctgtcagctcagagctttgttgaggctccttctggtgctgtttgggcattgttcaggattggagcgagaaggtttgacctgtcatgtagagtttcagctttcttaccctgggtacagagtctcaaacctacaaagtgggtatcaggggctgattactttatgaaaaggctcccatctacccccacaccctactaatgggattaaccattgaatactaaataagaaggaccaccactgcccatatttactaaaagctcaatatcatcatgctaagttctgttcttgtcttgtctcatgccctccatgagaacatccctcagtttcaagcatgacttctcattcctggttcatggaaaaggaagccaaggtttggagaagttaaaacttcaggtcacttgcttgcagtggtggatactggattcaacccagcattgtctgacatcatagctcatgctctgaaccactacacaagctgtacagaatggaaaatgttggctgttaagtccctatgtgttgggaacctggtttcctagcttttctggcatggtgggttgcatttcacttgtttttatgctggtctcccagcataaatttgacctcctttcatgggcctagaccctgtttccttcattggctgagcagtcaggagctcatctggtgaaagtaaagtgttcgcagatcttgcttcataaagaccagtccatactgagactcacacacctctgaaatgttcacgtaggtcagtggggaaatagaatttggattgcaataattatttatcttgcacagagctcatgaggaccacacaatggcagggcatgaggcacatcctatttgatctcaggtccttaacccattcatgcctgaggttgcaattttttgaatttttgcaatcagaccttggcgatgaccttgagcagtaggatacaaataactcccacatgcttagcattccaataatggaacactaggcataaatgggctaagggaggtagctcaagtgctgggatccccagggatatagctccaggggagacactttgggatactgagtattctggcagggaaacaaggtgagggaaagcaaattctaaaagggttgaatttactcagtaagtaatgtagactatgatatttcagcccatggacgaagttgacatacccatatctttgcctgaacgacccatctggtcaaatgccagggaaggaacatcagtcctaggtgttatgtctactccagggagaacagagcctctttacatgggcacttacagattaaatgggaatggaactgcatgttgaattgcctgtcttgagtctattagacctagcttttctggactacattgtaacatgcatctgcaaactctggaacaagggtagggctggctggcagtgtgggtgggaatggttttttttagctagctagcaccaggggcagtggagtagatatttttaaacttggggtgggattgaggtgaccaggggaagaggccctggaaatggtgagtgatcggaaagatcgaactgtgtatgtccaggacaagtccactgaggggagagagagggcagctgtggctggagactctggggagcagccagggggctaatgggagggcgttaccctaagtaggggacttatcatcgtctcatcaacctggacatttaagcaaagtagccatcagggacccacatcttctcaagatattttattttcttaagaaaaaggacaaaagtcctgagatgcctctattgcccctccagcaaactaaaagagcataagctgtccgcagagttctgtgttgaagggtgtcacacagcaagggagtaggggacaccagtgagatgtccctgagccacgggaaagagcttggggacactgctgccccctgtcccatttaaagttggatttctacctcactcttgaggccaaaataaaccccagatgtggcaaggagttaaatgcaaaacacaaaataaacagaaacacagggagacctaaaagaaaatagaagtatttttataattatggggaagggataccctctccaaccataacatctgagccagaaattctaagagtaaaggttgacaggttttacctttattcattttacttcttcatttaacacagtactggcaaattatgctactcaataaatatttgttgaatgaatttgactgcataaaaattaaatatttctaagcagcatgtgtgtatgcacacacacacacacacacacacactcccaaacctaaccataacatgcaaaatacagtatgacaacaaatgtttgctaaatacatgatagatgaagggttaatattcctggtgcaaagaaaaacaaagcctttacaaatcaataagaaaaagacaaatcctccaatagaaaaatggtcaaaggacatgagcaggcgattcagagaagaagaaatacaaatggtcaataatcaaagaacagtaatggaaatctttgcagccattaaatgtgtgagactgacctgtatttactgacttggaaaaatgcccatgacatattgttgaatgaaagaagtgggctacaaaacagcaggtagagtatgatttcatttacggaaaattatgtgagagtatcttagtctacatcttttgtgcaaaaatagaaacattctcaaagttgcttaagcaaaaaagagaatttgaggaagataagagtgcctcatcatccccttgcaaagtcagcagacatgtggcatcacccttgggtgggctggggtcaagccctcgtgggagtccctgggcagccaggcagccatttctccatcccctatctccctggcgccagagcatctcaaaactctttgcctccctctatttttctgattcctttttcccctctttgcaggccacctgggtagtgggattttgggtaatttttattcatttagaaatatatttctgtatggtttggggtttgtctttctttctttctttcttctctctctttttttttaatgaacgcgttatttttaaatttggaaaaagtctatatttttatttttaaagataaaagaaactccagttgggaagtgtaactgataaggagttaatatccttagcatagagaattttaacaaatcaataaagaaaataataccacaagcaaaaggaaaaatatggccacttaggagctcttatttagtgagtgtttactaagtgtggagaactacaaaactttgtacacacattctctcttcaacagctttaagaggtagatactattcttccctcccttccttcccttcttctttcccttccttccttccttcttgcctgcctgcctttcctccctccctccctctatccctccctccctccttccttccttcctccctcccaccagcctccttccctattttccttccttccttcctacttccttctcccattccctctctcctttcctctcctccttcctctctccctccttctctcctccctctttccttccttccttccttccttcctcccttcctttctcccttcctccctcccatcctctctcccttcctccctcccaccttccctcccttcctccctcctcctgcccccctctgacccactcatcctcccacccttcctccttccctctctcccacccttcctccttccctctctccaactcttcctctctcccacccttcctccctcccaccctctctctggccctctcactctcctgccctgtctcccttctttccattcttcctcccatgagtacccacccactgagcatctgcttcttgtcaggtatgttctgggctcctcggattcaggctgctgccctcatggggtttgcatgcctactctccccattttacagcaaggaagcctgagacctaaagaagctgtgacctggggcgccatttccgatgaggatgttatatgatccgcaaaataagaacacacagtttccagagaaagaaaaacaaatggcccatatgcagatgaaaatattttaacctgactagtaatcaaagaaaaaattcaaaagttgttttggtttactgatagattgatttgctcctccaacccaacaacttatgagattgataacaatgagtattgtatataaggttgggagaaaccagacactcttagtccgcccagtagctgtttatatttatacaaagttgaagagtaatttgggaaacatgtcaaaagccccccaaataagtgtctgcccattgtttcagcaattccctttttatgaaattattctctctatatattatattattatgagatatgttaatatttaatatatttattaatatataatacattacatattatatactaataaatattctataaatatatgttataaattttaatgaatattattataatatatattttatgataataaatatatattataatgatatatgaatgtatactatatatatggtataagatatattaagatatgaaatatcttatatagttatattatctcataccttatataataagatgtatcatcaataatctatattattaatctatatataatatatctaatgtatattagatagccaaagatgtttgaccaaggatattcactgagactcagtttataaagaaaacatttggaaacaatttaaatgtacttcagaaaagaatctgttgaggaaactatgactcctttactgtggaagtctgtagtttttgaaaacgatagcataagtctgtatgtttttgacatagagtcttactttgtcactcatgctggagtgcagtggcatgatctcggctcactgcaacctctgcctccctggttcaagtgattctcctgcctcagcctcccgactagctgggattacagacatgcgccaacgcacccggctaatttttgtatttttagtagagatggggttttgccacgttggtcaggctggtctcaaacccttgacctgaggtgatctgccctcctcaacctcccaaagtgctgggagtacaggtgtgagccaccatgctcagccaagattcccaatttttaatctcttcatctgttgattttttttagaaaattttctttaattttgttactttatctttataaataatataaatattatttatataatgaaatacaaatattcctatttacagcagcaggtagagtatgatttcatttatggaaaatgaatatggaattatggaatataaatattcctatttatatttcatgatgtattttccttgtttgtttcataagcagacaggaaacctggcataaaagctctggagggcattgcccttcccctcctgatgagattgggtggttgatgacttttctctatgtccctaaagttgcccctctagtttctttcagaggatgttcatctcctttgacaatgattcttgaagaaacaaacaaacaacaaaatctaagctagttgactaggagaagccacaggcaagaagtccttcttggtgtggtagtaacaagcccatctccactcagctgcgctgtttgaatgatgctgttccccagtttcatatttcttttaggtcccttaacagagacttctagggccccctttgtgctgaggcgaggggaggttctgccctggggaaagacctgcctgggaatgcccccacactgtggacattggcagatcttgcacaaagcgggcaggttgtgggggtgtggggtgcatgtgcgctggacccataaaccatcctgcagaggagaaacctttctttccaaggacggtctgccgagctgattgggcctcgagtaatccacaactaggttttattttgatccctttccccacaacaaaaatagcttccttgtttgggcttggtttaacctgattataaaactaatgtgtgatcattgcagaagggtataagccaaagatccatgtaaggaaggaaaatatcagtcttaactcttttgccctgagataatcattcttaacattttgctttatatcccttcaggcttttctatgaaaaaactacttatctaaatatcttttcattttcacaaaaagggggatcgtagtatacaaattggtcttgtgatctgcttttgccacttaataccctgttagtgaatattttgcatgtcaaaaatacagacctggctgggcgtggtggctcacgcctataatcccagcacttcaggaggtggaggcgggtggatcacctgatgtcaggagtttgagaccagcctggccaatatggcaaaaccccgtctctactaaaaatacaaaaattctctggttgtggtgatgcatgcctgtaatcccagttacttgggaggctgaggcctgaacccggatggcagaggttgcagtgagccgagatcccaccactgcactccagcctgggtgacagagcgagactccatctcaaaaaaaaaccaaaaaacaaaaaacaaaaaactgggaaacttgagctagaagtttatgtagagaaagttgagaaaaataagattaaaaagaatgcactttaaaataaactgttagggatagtaagacaatgaaatacaataaacctttttaaaagcaaacaaaaaagcaacttaaaatagggagagacagaaacttagagtttgaaaaagattaaaacttgacagtgttctagttttaaggtgtaaagaatagagaaaaagggttccaaaaacatatctaaaaggtatttaaaaagggaaatgaaacattataaaagaaggttaagagattactagaagataaggcaagtcaaaggagaaacaatcaagacaccttaagttggaggaagctaaaattataccaaatataagtatctaaagccaaaatattatgactattttaacccagtaggcacaaataagagacaatcaggcaggttgttcaagtgtttcatgcgcatacgtgatgaacccagaattgcccatgcttttttctttctcaggtattatcacatttagttatctgagtaattatttgattaatggctttcttccccacgagacttcaagatctgtgagggcaggatccttgcctgtttaacttaggagtgatgaatggtaaatatatgttcattaaatggaagaatgagtgaggcctctcccagaactcgttttccatggaacagggcctgtggcactgtgccccagcagtctggaaagggaattgctcagcaaaggggatggggctgtcggctccccctgcctcaccaaccactagagccttttaccattcaccgattgcccatggaagctgaattatgaccccaggcttgcaggggcttatgggaaaaagggctatgagaggtagaaagccaccatctaggcatggggacacccttgggctgccattgcagacccctgcctgagtggctttggaagacattctggaagggaaacaagggctatggctgtagaggatggggaggacctttcttctggtcactctccttcattcttcagtcccactgcctggggtatgactgggaccaggtcagaaaaggaccccattctgctgaaaaggaaactgagctgccacatggtgaatgacagatgtgaggcaggtttgatttaatgatccgggccatgagactgtgagtctttgcggcccacagagaaggctggaaggcagcagaggggggccaggtggagcagggagccctggtttaatttctaagaggcctacaacagagcacctaggtgccctagaaaatgcgttcactgacagcagtgagggtaccttcaaaattcaagtcctatctgccctacctcaccacaccaaccaggaaattaaacaaccatggtgcccttccttagtgactacatttgtgggtgtgggcaccgtggttcttttctcttttctttctttctttctttttttttttttttttttttttttgcgtcagggtcttgctctgtcacccaggctggagtacagtggcatgatcatggctcactgcagccttgacctcctgggctcaagcaatcctcccaccttaacctcccaagtatctgggagcacagttgtgtgccaggcaacacaggtgactaatttttaaaaaatttcttgttgagatggggtctcattgtgttgcccatgctggtctggggctcccgggcttgagtgatcatcctgccttgacttcccaaaatgctgggattacaggcatgagccaccatgcctggcctcaactgtgattttaaatggtgggattgagattttttccaaaagtaactgaaccaagaaggccagagggacaaaacttgcaaatcgagttatataatgtatacaatatgtataatatatataatatgtaatgtatatattatgtataatatacaatatgtaacatatattatacatacatatataactacgtatgtataagatatgattataattacatatgtattacacatacatatatgatatatattatatcttatacatacataattatatgtataacatattataatatataatgtatgcatagtatataatttatatataatatctgtataatttatgtataatatatagctatataatatatattatttgtgcataatttatatatagtaacatatatttatatataattttactgtgtatatttaaggcacacaacatgacattatgggacatatatagatagtaaaaaggttactgtagtgaagcaaattattatatccatcatctcaaatagttatcctttttttgtggcaagagcagctaaaatctaaaatctaaaattcatttagcatgaatcccacaatcagtacacttttcttacctacagttctcatgttgcacatttgacttctagacttgttcaccctacatatctgatccgaagtacaatggctattaactacttcatcaggggaagaagcagaagttggtggaaactgttgaatcgtgaatttctttcttcgttttatagctggtgaaattccatgttcctgtggtgggtagtgcatggcaggagccgagatcttgttttatcaagatgagtgggcctcacaaacaaatgatttcattctgttgaaaggcattatcactgcatctgacatgaaaatattgtggggggaaattagaagtggaagtttataaaatggaagtgtccgggggcagcctgcattcatatcaccgaaacttcagcatagctttttttttaaagatagaaattttgcccacatatacactaataaaaataaatctgtttccgattactaactatgcagccaggtgcttgtttgttatgagaaaggcatgttcattaattttcagctatgaaaagtgcactgtgccataaatatacaattcaaaatgtactgctgataaatgaatacgcagattgttaatgtgccagagaggggtattaggcatccagcacaaggcagacaggtacccaggtgatggggctggcactttcagacctggcgttccagcaaccacctagccagcctctgacagtctgtgctcctgtctttgggaggagtttgcacagcccctctttgggaggcttcaacttgccctgttttctctttattgtggcagattgggcagtgatagctttagggaggaaggcaggtggcaatgagttgcccgcagaggcattctacagagacgcggggatcgctgcttccctccttcatgatgggtcagtgctcctcgatgtagagtgttggccattgacctctcctctatggttgcaaggaagcagacatcagagcttcctggaaagctagaagtaggtggctctcagcccagatgcatcctcacctctctccaaggagaaggatatgttcccactgtagttatcctcatcgccttggactgggagacatgtcctgccttccctctttgaatgccgtcacatcagaagagtgacatcttcttgtccccgacctgagatgctgatcagcattgtagctttgcatccttggcaggacctgtgtctgctgccatgagtctgttgcccgggtcaggcgtagagtggggatggatatcatatctcccatttggcctcctcagaggctgagccctggctggagaacaaaggaaataacactctgaagtgtgggtggagtacaaggatgaccatcaccacttgagatcgtttcaagcatcttcagttttcagagcctgaatggaggggagccgtgggtaagatgggctgctcctggcagagcatccggaaggtgatgtggcttggcgaggctttttccttccttcccccaccagacaccttgcccagctctcagctcctgctcaagaactcttttctctggttcatctctcgcagcttggggctcctgactccttcccttgtctgatagaatgtcacagacccccaatatattttgtttacattaaaagctaatgcagctatgacgtgaaattttaatttatacacaaaccataaaaaagccttcaggttcatgaattcctgatgaggcagagactaacagtatattttgatatgtttacagtttatgttttccactaagaatatctagtttgtgggtctgtctggggtgctagtaaaagaggggaaggaatggaacgaattcaagcagttgtctcagccttcattgtgtctgcggccatggcagggtttgaaagcattttcgggtatgagctgaaatttgttgtactgcttggtggtaaacagacacgtaactcacccccacagcagacattaaagtgttacaaattaacatacacatgtaaaattttaaatataattaatttagcagataggaccttgcagttgtcacattattatttaagtcggatgcttggggtggctcagagcttacatgggtggggtaaaatgcaaggagaccgtatgcacgttaatgacaagttaacttgtgtctagttgagacaatcacgaagaattaaacaaagcttttagagggtttctggtgctatttatccttcccctccctaattttcataacatagatttataaaggaaattagaaatgaggcagagtccataaagggtccttggaggataatccatacatttacattaagtataattcgatgtatcatctacgtgcaaacttttgtctgcaaagcatatggcaaagcttttatggatatacagacttttattttaaacttaaaatgatgaaaagtttctgagcttcaggatcctcttactggtgactggagaaattgttgatcacatttttaaaattcagagaattagaaccataaaatatactgcaaaacacagaatttaaaatggttgtttttccaatgcctgcaaaattgttttattaggggactgcggaacacctgccttaaaatgtcgttcagaacatctcccgaatgtcgttttccttaattgacttggaaatggcccaaatgtattgctgaatgcagtctaattaatattaataataaatgccattattaacatcaaagaacatctggtgctcctgtttactctgaagccttatatgtaacacattttgtggctgtttcatcttgcaaacattgtgcagtaaacagtttttgccatgcaggtcaaaacagacccctgtccaagcataatgcattatatttaaaaaaaatcaaatattttctttgggtcacattcgttgctgtgatacgagtgtgggttagaggtcccttgagtaaaccattttgaaaaaaaaaaaaagtgctgctcccagcatctgtacattggctacattagagttttgtacaataaatcaaccactgaataactttaatctaaaatttcattaagtagttcttgtcaggtagtaaagctggataatgcagtgctgtttaatgataattggtgtttggttaataaattctgcaagttcgaattactttctagcaatctatagaatgcaagcctcagcagtgtaactaaacctcaaattgattaacttgcatgaaccaggcgttcacaaagatggcactattccaaataaaaaagagaacagcgcatcagccggatggtgttatgttgctctggagtaaggaaataaatcccctctgggtgcatttttaaaagcttatgcctttgaaatgatgtcatcatattttatttttttttcttttctttcatattttctttatatgtacacacacttaggtcaccagttcacaagacacgtgacacattagaataatggaaagcattttttttatatcatagaatcaaaaccacaaaacaatttagctggaaagtattattgaaagggcgccattaccagcaagctgctgctctctagcaattaatggaagcagggtgtggctagatgagggtttgctgtttccttcctacatcttgtgtgcgcaagaaaataaaatataagagccatttgcaagtgaaatcagcgcctaggttcttggagttgcgcttaggagtcctacatcccaggtgcaacgaccctgcaggacagcaggcacctttttctggtgggatttgtatttgggatggacatattggattaagtgcatgaattatgttgatcttctctgtgcccccaaccccggtgactcctgtgacattggtgtcattcaatcagcagtctgtaatagttccaagttaaaaataacatttattaaatgtcttgtaacacaagaatctggtctatgatgaagagaggaaaacaaggcatctaatatcagaagaaatgaaccaggctacaacagggacagacagggaggtgtgtctaccaggtcctccactctagactagagttgaagggtggatggaggatttaccccaaatgtgggactccagaaacacagctcccggtggtcacaaccaacttgttttggaggtggagcaaggtcctggtgggaagattggtggaagaccaggtgcttgggatgtgtgaatgctagaacattctccaccaagctgtttctttctcccctgcagatggggggattttgaaggattctgagaccctcaaactcagggctgagcagtttatcagcatctgtgtgcactgactggtgaggggcacgttgggtgctgtgtgggacacacgagagcccattggctttctgtgtgggggagcaatgcaccagctcagtgagacctggcgagccaggtcctgtttctacctgcctcagagtggtccttgacccgtggcaggctttgctttgcttttgaagctgagcagattgtgccaaatggcgtatgttttcaaagtgattcccctaaggagaggagcacagacctcagacacaccccttctactagcctccatagattattcaattgaagcagtttgtccacatccaactgggtggttagggagaggttattcaatttactcccaccctcaaaaaaatcaaaaagtctgttttcaccctgagcctccccttaatctcgttgatgtggcaggggtggcatgctgggtttcgcatgctctctttctgattggttttctggtaattattttacaatggtggtgtctggaagccagaacccctgggtcctgcaggggggtcaaagagactcacagggagatgagaaatggtgtgactgtgttggagcaaagaaagatgaccaagtagaagagtgaccagtagacgggaagacccagtgtcccaacctgcaggaggaccttacctctcttttccaggactttatgcagctcttctggtggcttttcttggggcatcaagaccagcttcttctgcttgattccagagggcaccacccctaccccaccatacctgcccctccaggctgtgcttccatgctgcatgcacaaagcacctgtcttggcctccacatccagaaactcttctcatcccttcatctccatattgtacttgcaacgtgaggacccctcattgttgactccggctctgggtagcttgcagagctcagtatcaggaatccagtgaccttgactccagtctgctctgtccttactagctgtgtgagcctggatttgtaattcaacctctgtaagcctcagttttctcatctgtacattggagataataaaactctgtggcccagcgtggtggctcacacctgtaatcccagcactttgggaggccgagatgggaggatcatttgatgagcccaggcgtttgagaccagcacgggcaacatggcaagaccccatctctacaaaaaacaccagaaaaaactaaaaattagttgggtgtggtgactcacacctgtagtccctgctacttgggagcctgagatgggaggatcacttgagcccaggagttcaaggttagagtgagttatgatcgtaccactgcactccagcctgggcaccagagtgagaccctgtctcaaaaaataacccaaaatataacaacaacttctgccccaaagggctgttgtgaggatggatttagacaatgctttgaaagcacatagaatgtgctcgattaatgttaactgctattgaagtagttatcgtttatgataagagttcagattttattattattatcaccattacttttagtatatttattttgctctccctggtgcatgtgaagcgccttcaggataaaaacctgaatcatcctcatgggaagtgtcccgtgctgttaggacagagtaggatctcagacagcgctctatgatcacagcagcaggaaggcacctcaggaagccattggtaaaacacaggggctttctcggtcttataccttagccagaaatccacagtggacaatatagaagcagatacaaaattgttcctggccttcctcttcttaatggaatctcccagaagtaaaataagaatgcccattgctctaggccaggcgtggtggctcacccctataatctataatcccagaactttgggaggccaaggtgcacagatcacccgaggtcaggagttcgagaccagcctggccaacatggtgaaaccctatctctactaaaaaatgcaaaaattagcagggcgtggtgggaggtgcctgtattcccagctactcgtggggctgaggcaggagaatcgtttgaacccaggaggcggaggttgtagtgagccgagttcatgccactgcactccagcctgggtgacagagtgagactccatctcaaaaaaaaaaaaaaaagaaaaaaaagcaataaagaaagaaaagaaaaaagaatgcccagtgctcagttgagaatcctacataggcccagagatttatccacagagagacaagggcagaagggaaaattgggtggacatgtttgctgtggtctaattgctctaagatgaatgaggaccatagagagaactaggtacctcaccacaagatgcaaacatcagccaggaaggacccaggtgcctcctttgccgtcctccgtcctcctgggcagcttctccctgcacggaccagccggcctggtgtgtgtctccacggcactgaacctgtgcagggcaggctctccatgaatatttgctggctgaatgaatgaactcaggggcaacaggaaaaggacaacgttcaagccaacactagggacataaacttaagtgagacaatgaggccagaaagtctaaagtgttttctgtcacttggtcagatctttctttctccttgaagaagccctatgaagaaagccctggaggagatgataatggcgcctttcaccacggaaaggtcaacccacatgtgttcattgagtgactctgtgggccagcccttcgctcggctctgttgatgattacgagacaggcaaacccacggggtactcttggtaagtaggctggaatcaaaacacatgagaaaaattagtgagcattccaaagcagcatgtcattgtatagaaatgttcagaaaaggtttagagacggagtgtgccgggaggccaggcgaggcttcgtggcggcagtggaagtgcgaggcttcgtggcgaggcttcgtgaagtggtgatgagaaacgcttgaaaggcagggaggagaaggtcgggccttctaaacttggagaagataggggaaggccaggtgtggtgacagatcccaaggccagtgcagcagtgaagaaatgtgtcactgtccccttggctcaggcccagccaccgagtcctgggacgtgatctttacatcgcctggttctctggttgatccatctttccctctgatcactgcccttcctcctggggcctttttgaaatctgactcaggttctgagcacacgtttcagcatttctggatgcaatttggtatcatagcgaagaatcaaagggtatttgctatcacttgaaagtctgtttctctccctcttcctctgagtacctgaccccacaatcatcactggctttgaaataacagacccatcataattacgagaattagtctggaggcttctgccttatttgcctaactgagattattaaggccgtttttagaggtggaaagggctcccaggatcatctcggctgagatggcaaattcagagagatgcctgcagggtgggggccagccaggtagtgagggtggggaaggggcccggtggggaggacgcatccactgcccagcccatcaacccttgctctttgggcccatgggctcagcattgggagataacacagtttctcaggagaagctggaaatgctgaccatgtgtgagtgaaatgtcccaaatttgtatatgttaaaaacaaacttatagcctgcgtgacatagtgaaatcctgtctctacaaaaaatttacaaaattagctgggtgtggcggtgcatacgccccagctacttgggaggctgacacgggaggattgttggagcccaggaggtcgaggctgcagtgagccatgatcacaccactgcattccagcctgggcaacagagcaagatcctgtctcaaaaaaataataaatacatacatacatacaaacaaaaaaacaaatttaacacatgaaaaccctgtgtgattaaacctttgcatctcaattagagtcctctgcccccattccatgatttgggggtgcaaacagaagccccgaaataggaaaggacttgggcgaggtcattaacgtggtgggcacagcgtgtacctaccccctcctttgccaggtccgcagagttatctacagaggtcagtctagcaccctcccattagcctgctgcttgaactgtctccttctttccagaaacttctgcatgccagtgaccagatcagcctctctgtggctttgaacccagggtgcagaagcctgatccagtcaatgctccaagcacggtccagccatcacctcgcagctggccctgtcacctcctgttgcaggcgaaggggcagcagcaacctggcagccctgggcagctggcaggaagggccaagcacttacgaagggtagcttcagtgttcttacagggtattaaaggaatacagcgagagttaatgcaaaactccttctttgacttaatttattataatatatgtggctaaaatgtagatcacactgctgtgttggatctccgttttgattcccaaaattgcaatcatgatagtggattataaccgtgctctaacacatagatgaggaaatgtattcctgtgcaattttccccgaaggagaagtcagaggataaggggcaggagttttgaataaccttgcaacatttagttgtctctctcaattataggatagaaattagcatcccaggatgatgtgcgtgtgtacgcagcaccgctttgaatattagtgcagaaggacatctgagggaatggagaaaatgattttccatatgaaagaaaaagtcactggtatcgaatcgagcaatgtgatgttgccttttattcagtaagtgcctactatgtgctgggcacctagctaaaggttgggggtgccaccgtaaaccagacagaccacaggtttgccatggaagtgagccttagcagtcagtgttgggtgatgcccaaaaaggagtgaaccagggcagagggatgggggtgcagggatgggggagctatgggagagcctggattgcaggctgagggaaagaaacatcccgggagcagcacgcagatgggaaagccaagtttgcttccttgttctggtggtgcgtgcagagcatccgtgtggcgggatgcccccaagaacatacatctgggcggactttctcctcaggcccagagactcagcagaagtacccaggcagaacgaacggcctgaggtgctgccccagggcctggactctgcagtctccaccagcaacggttcaaggccaacacctgcgcagcctatcgcgtcccaaggttctgttggcccaaatcaagccacctgcctcccccagcccagctctggggtggggctcccaagagccaccagccttgctgcaaaataggattgaatttctgtgtggatgtcgagccctggctggggcaggtgtggacagggaagggccctgtggcaggagggactggaagctttgcacagcaccttggggcaggtgaggctgggaagaccaagctgacttctccttgccctccacggggttgtgctctggcagtgggagccctgcactctctcaaggagagcctggaggagctgcagtctgcagctgcaagaggagggggctggactgatggaccacaagggaatggagccctgggataccagacaccagattccccacgtccagctttccttcctggagagagcctgtggcagcctgtccactcacagacacaggccacctggacccactgccaggccccacaccctggaagggcaggtcagaggtggctagttatgtacttaaaaggaaaaggcagacttcttagattgcatgatcatggaagggtggccagccctccccaacaccattcattcattcattcattcattcggctggtcaccagtatttattgaacacactgtgccaggaggctctaagggacacaagagtgagaaaaacagaccccatcccagccttcaaagaggtggcagtttggtggcagagacagatattaatcacacatatacgctcagtgcaaactctgagaaatgtcctgaaggttaaattctgggatgattgggcagacctgacttagtctggaagatgagagcaaatgacattggagctgaaccctcaaacatgagtgggattaaccaggcaagatgcaggtggtgggcctggggctggtgtttggggtttgcatttcaggaagagggaacagtatgtgttgagattctgaggtccaacagagagagaaatttctggcccggtgggccagtagggccagctctgggatttttaaggcatttcaggatgagaggaaacatttcttagatctcattgcagtcccaagttcctgaagctcttaaattctttttcaatatcagggcatgtgttctcggggtaggggatgagccagccagggggcttcccgggtgcaagcccccagcgtgtaggactgaagggccctgggacctgtgtagttgtggatgaatggggagctctttggagatgttgagagaccaatgggatgctgaggcctgagcttctacctgctgtctgcttctttctccctgtcatcccagtgcccacatccccccaggtcctcatacccccaactccttcacctactcccctcaaaggggtgtttggaggataataccaagtaagctctaatttctgggttagacaatgtgggagagagtgaagatgtgttatgtctacatggagttcctactcagggctcggtggtgcttggcattaggaaaccttgttgatcatgcagggggaggggctgaccattttggaggatcctatggtgactccatgacatggatcaccacctgctggtttgctgttttatgctggtttacctttttcatactttagaccttgtagatggtggggttgggaggctaccaattgggactctgctggatgaccttttgtccacagtaggaggccttattcccatgtcataggcagtgtttggaggctgggcgaaggtaggaggcatttacaaacacacagctcggaagtggcctcaccagacggagcccagagccggccattgcctggtcagtggcttccccactctgccacgcagggtttaaagtgcatgcagctttgcaagcccattgcctcatgaagcactcagaccctctgtgactggcaccattctccagtgatccaactttaccaacaaggaaatgaaggctcatgaagctttggcgctttgctcaggaccacagagccagtgctagcagagtttagattcagacttggctcccggagtcccttggtgttttgaggtgctcgaatgcccaggcaagcctgttcaggcagcattaaaagtggcccgtgtgtctccctgtgttgaggaggattgggccatctctgtgcatgtctgggggctgtggggacactttgctcagctacctgctgctccccttccctgaaaagcaagggctgctattcttgcctgcttcttctggggggcttgttggaggacacactcatcttgggatccttgtctctggtctgaatttctttggaccagtctatgggattcccagactttgggaagttcccattgagaatttgccagacttgttattttcatctgtgatcacaagaaaaacaagcaaacttgaccttcctcctggaagctgctacccaggaggctagtcctggagctaggtcagttcatttattaaagcattcatttattcaccccatttggggtgaatattggctggacaccggccacgtgcaaagtatggaggaggaggaacctcagcccttgtcctttgcactttacaggctagaaggaaagctggtgtcaaagaagaacaaaattcaagccctgtatctagccagagaagccagctgggggccacttgggatgggaccaggtgctaaccgcggtgataactgggagtgacgtggcctgacttataatcaagaaaggtcacccatgtggatatatcagaagaaaacaaagttgcctctcaggaactaccaggaataaatttacactcctctcagtctctacaaggggaaacacagtgaaaacttagctaaaagtgtcacagttgtattgtgtaaactacactgcccttcaagcagcatgggacatcacactgccagggacacgaacactggaccgggagggccattcgcagggcaccacccagggcttctgttggtctgcaggtaccaagacaatggacagtggagtggcctcagctgtctccttggctcctctgctctgtggcctgagccagacctgaaggttttgtcctttggaagtccaccagctgggaacaggtctccagaaagatccatgtgcctgtgcctgattggcagagctggatatatatacatatatatatacatatatataatatatatataattttttgctaattttaatgtcaactgaagtatttattactacaagatattgaagggttcagcatttattcaaaaaaattttttaagctgatccaaggattgcgttcatctgatatgttctcaaatgaaaagggctagataagtcagtgcagctcaaaaatggcagtaacttcagagctggcaattgacacttgttttctgccactgtttactcttcaataaaaaatgcatatttaccatagcaacctcctgatcacgtggagccctatcctacatgcgaccctctaaaacagaatagcttcttaaaggaacacacacatcctaataggcatgcttttcagatgcaaaaacgtgttctttataaggaagccctctttcctgggatttagtgctaataaacatgtcatccttgtagaaatcattttggtcccctgtcttaaattttaagatgttcattctggaaatccaaataaaattactcttggaggggctttcaattatcttaaggatttgttgattatttattttaatatggttctaaatatatatatttgtgtttatacatgcacataggtatatatattttaaacagcaaccgttagtatcatctggaagggagtttggtgcagattctaacgacctgccgcttcatctgtgattaaagattgtcatctatgcgaagctcagtggcagcctgaattgttttttactgttaacttgggaggattgcctggggttttagagctttggaggagctgccccaactggacttttcagggaaggatcatgtcccctcatgctggcactttgtatgtgtctgattccatagcttggagctggcttggggttggcgcgggggcactgccagggacacgaacactgaaagctgctactcaggaggctagtcctggagctaaaaccacagatctgccccctccccatgccatctttacatatgacgcgttgctttggcaatattcatgttgaaagccactattaattggagcataacctccatcaggcaccatgctaagtgatttatataccttagactctacaatcctttgagacatgaattcttgtgactattcccgttttgcagataaggaaaccaagcctcagagaggttatgtaatttgcccaggattacacgcctaagacctggggaacttggttttgacctggggcttttggactgcaaacctctccgcttattctgtcttctgaacctgtctgtcagatttagctctggaaggacaagtggcgacaagatggagaagcctttggagatagggacagtgacagtggcttccctctcagaatgcttcctccagagattcctgggtactctcagtttcagcagagatttgtggaactcttttcatactctgatttttttttttaatgcctgcacctggcagtcaggcacccttcccctgtgctgggctgaagtcagggctggagtgccaagggtctctggatgccacagccccagggagaggtggtatggctgtgtgaccacaagtgtggtcaatgcctctctgaggcaccactgtaggctaaggaggcatcccagccgggcctggtggatttttagtttctttcaatgtgagaaacaagaacgtatttgtgagtctgttatgcttagtggctttggggcaaaatccgattgtgaagtgaagctgggttctccatggcacagaggcattgtgacctgcactccacggaggggcattgcccccaccccgtgcccaggccagccaatccgacggcggcaggctcacaagccatttcataattatccatcacgaatgcctccatgccgccctaatagattatttaaaatggtgtgtgtgtctctcatgcaacctcaagtcagccccaaactgtacatgcgtacagcctgggagaggtaattgtttatcatgtatctctttgttgcagacacttttataaaagagtatgtattatgtatggtgtgaccttcaaatgtcaggaatgtgttttgcaataaactgtcaatatttgtggttataaggtactagatgacttttacaataattggaacggctatattaaaagctgggatcactcggctggttaaagagaaagacacaggccagcgttcatcagggacttgccttctgccaactattaaatgaaagatagtgcaaggtgctcaagatgtcttctttgtttaaaaaagaatatggcaagacacatctctaggggaggcgttatctccaaatcatcccttctcctttcagtgtgctcaattcccaggagaaaactcaactccgcaagttatagtgactgaccaaatacattttaaaaaagattggtccagtttgttcctggtgtcatttaggtaagaattcctggagtcagatcttccatcttctcccctcctccacccccacccaaacaggaggggctgtaaattatcttaagaggatcttaaaagctatagtgttctttttttctttcttagtaaaataaattacgtagacatcttttgggaatttatgctttagtgaaagtagaggcttatactataattttcattttttgtttaaagaaaggagtacttaatttaaattatgaagaagcaaaggcataacaaatattttattataattattatagtaattggatcatagattacattaaaaatatctgtttcactatgctcttctatgggtgagtatctctttatgcttatgtgaagtcgtttctccttatgatagtcagatcttcgtttttaaccaggaaggaattgagtaaatgaaatggggaaaggggcctcacactttagtcttctaaggagctctcttgtggccttgctgattataattgtgtgtttgtggttccttccacctggatggagggagaactgggtgacaccctgaggccccttcctccaggaagcctccctggacatccccaggcctcctcaccctgcaatcatccaactccagcacctgcatgcgctgaacactctggagcacttccgatgttttgacggtgccctggactatttctccccaccagctgctcaaagtagcttccctctcatagtcaggaactggtcttaatatctgaattccaacttgcttgccttccctgatgcttttatttgttgaaaaagtatttataaagcacctgctatgagctgaggacgtctcgcatgctagaaatgtcacggcaggccatagtgcctggcccctgttctcctggagctgacattctaggaaggggacaggcagtgagcagtttaatacacagatcagctgaccatctgtgaagggcgatgtggaaggtgacatgggctgagagctgggggttgggagatttccttccaacagtgcgatcagagacaatctctctcagagaggtgacttttacacgaaagttagaagagcattctaggggaaagagaattccaggaggaggggaagcaggaccaaagccttactggagaagggacgtagcctcagaggagaacagaaagttgggaaccagcctcagaggagaacagaaaggtgagggttggagtgcaggtggggagttgggatgaagtcagagcagtagggaggccacctggacatattgagacacagctggaggttattctaaaaagcaatgaaatgagtagctggtccctgccctgcccccaaccagaggctgttcccaggagatggcagcggcctgggctgaatctctcagactcattctcctgcctgggtcttctcaccaaggccaggttcttaggtgaccctgctcagcgacacgaatggtctctggggtgggctccagcccacagtccctgtcccacagagaagagacaggtgtgcagagcccaaagagacatgtcacacctgatgtcttgtcccaggtcaattctgtgaatcccaaaccttgcccgctgcatccagggttgcagtctctagcctggggactgagagtacctgcccacagccagcccatagccaccccttggggccttggcaagatgtggcggtctgcggatgacaggggatgttgtcacagcagcatcacatggtgccagagggcagagaccccatgggtggcctaatccccagcagggagtttcacagactccaccaacaattaagaacaggttcaggggccgggcgcggtggctcacgcctgtaatcccagcactttgggaggccgaggcgggcggatcacgaggtcaggagatcgagaccatcccggctaaaacggtgaaaccccgtctctactaaaaatacaaaaaattagccgggcgtagtggcgggcgcctgtagtcccagctacttgggaggctgaggcaggagaatggcgtgaacccgggaggcggagcttgcagtgagccgagattgcgccactgcactccagcctgggcgacagagcgagactccgtctcaaaaaaaaaaaaaaaaaaaaaagaacgggttcagggcttgggaaaaccagaaacacatttggcccacagttcttgatcttgaagccctggtatattttaaggaaaatgtaatccatgtgtttctgattcattttcacttaactcatcaaaatgttgctttagagaaggtatttgaaatcctagtgtcttatatttctccctttttctttttttgagacggattttcactctgtcacccaggctggagtgcagtggtgtgaactcggctcgctgcagcctccgcctcctgggttcaagcgattctcttatctcagcctcccgaatagccgggactacaggtgcctgccaccacacctggctaatttttgtattcttagtagagatggggtttcaccatattggccaggttggtctcgaactcctgaccttgtggtctgcccacctcagcctcccaaagtgctgggattacaggtgtgatccaccacacccagcctcctttttttttttttttttttttttttttttttaagaaattagccttttgatgacctacttccccaattccagaaatcgtctcttgccaccagcaaatggaactctgcccagttttgagtttgggtagagggtgagacatggcaacatggaaaacatgccacctctctatctcacgtgtcccagggctcaccagtgaggtccaatcccgaccccgttggtaataacccacgagcaagctgcctgttgcctcctcacaagtggacatcgttttctaaaatagctctttatttaaacaaatactttcaccaatccataagaatacttaactgtttaacatgactatatatggccaccataaaattgagcactctgatgcaaccacagagacaccaagttgatactgacccgaggcatgagttatgtcttctaagagttaggtagaattgtttacagtaatgttataattttcatgcataccattaattttaaataattaaaaaaaataaaagggccagttgtgattgctttatttgagtctattaaagctttcaaaataagggaagtgttaagcttttaacagtagctatacattcctttggactttccccaaggtgtcggtattatcttgctcctgaaaagatcttcaagccctggcatacgtgggcaaggacattaagaaagatgtgatttttttgttgttgttgtgccactgaactgcttcttcaccccttagactccacaaatagttttttttcttcattaatgaagtgagagctgtgattttgagacgttctttgcacaaagcatacttgcagaattaactgacaactcatctgggaaaatgtatttactgttatactagaagctccatagaaattaaaatatcatggcatttgatgccataaacgtagtaagcgccagggtgttcacagagttagtcaccttacccatgcgtgcttgctggggtaactctccagtcaccatcatcattgccaacagcatcatcattataattttttttaatggaagtctttccaaaatgtacttctgggcatctgaagggtaaggctgccagcgagttgggatgaagcgagaaccaagaatccacatgcaatataagaagaagtcattctttcctttctctttgtcctctcactctgcctcttttggtttctatctctggcttctccctttcattctgtgagttaattggactccctggaagattggatataaacccagaagacttcaccagtagaggattgactcttcttagtcaatttctgaccttttcccacaatggctacccccaacatctctatggcttaatataaccaggatttgtttctcattcatgcaaagtgtgatgtgggtcagctgtcatccatctggtgactcagtgacccaggtgccctctattttgtgattctgttgtctcaacctttgcgttgcaaggtcactgtggcccaggaggagagggcggaggaggtgcaggcacactctgtcttcatttccttcatctgttggccaaaactgaccacctgtcctcagcttagtgcaagagaagttgggatacgtaggggtccagggactagttagcaaccatttgccgtcctttttacagtcatttcttctcgcctctttaagacccaacatcagtatcttctttggctgtagggtggggtcagcggggagaatgagaggccaaaaaaaaaaaaaagcagcgggcagagacagcctgggataggcttggagctctttcagcatggcgggacccggaggtctagtcctcgtgggtcagatgggaaccaagggcgaggggaggggtgaagggacttgcttgggatagttggatattagggacccgggaggaaaagattctgcctcctaacgcctgagtcagcatttttggaaaacaacgctattttattatacaaagaagttcagtgtttagagagaatctagggggaaatctacccttcaagtacaaaatcattttataaacaaagttttaatatcccaaacatattatatataaataaggttaagtgtgtgttgaggcacccatccattcaaatcatgtttgtatacagcaagatagccaacctcaggggtggtttcagacagctggtgacagtgttttctaagtatcggggctttaacttttgagaagttgtttgtctttctgagcatccgtttctttgtctaactggtactgccgctttgtggtccagtggatgatgaggattctaaaatgatccgtagccattttaatccccccaactccttcagcccacatcccctcctctgaatacttggggaaagcatgcaccttcatgtcaccttgatcgaggccaaccttgctatagactcggaggataagaacaagcgaatgggcatgtagacaacattgctgaccttgagaagacaaaattaggaaggtctgttgcctgatgtctccttgttcctggtaacagacctttaaaaaacttggatccacctcctttttctttagcaagtcactttcagcttgtaggcacgggcagaggagaaagctggcagagcttttgatgcctacttcaacacatttgctcttggctacagtctaggagggttgcaaatatggcctgtgtctgcctggaatattattcgttgtacccatgcaaggcacccacatctgaagaaataatcccatattattcagtggagtcaagaaaagaaacaagggccacaggagctgtttctcagctgtttctccatcaagtgggagcccagagcacacccaggctgagggtgcattaggcaagagagggcctccccgcctgcagccaaaggtcccctccagggacatctcagtctctaggagctggcaggggtctgtcatttcacagatgagcagggaggaacagatggcagcgttgaggctgacctctgtccacatgtctgccttcagtctacccagcacattagagaaagtgtcacataggagggaaggaataccactggttagaggaaaagaaaattaaaaaattaaataaatctcaaaccaatgcacgaaaggtttaacaaaggatcacagatgcaatttttgtaatacctctctctctgtctttttgttgttgttgttgttgttgttgttgtttttgagatggagtttcgctcttgttgcccaggctggagtgcagcagtatgatctcagctcacttcaacctctgcctcccaggttcaagcaattctcctgcctcagtctcccaagtagctgggattacaggcacgcaccatcatgcctggctaatttttgtatttttagtagaaatggcgttttaccatgttggccaggctcgtctcaaactcctgacctcagatgatctgctggcctcggcctcccaaagttctgggattacaggtgtgagccaccatgcccagccaatacctctgtctttctactgcctgcttcctggagtggctaggaaagggctggtctgtctgcaacataaaccagtgactgctttctccacctgatgttatggggtgccaggagaagtgatgggactccctcctgcagtttgcagaggggcagacgccagtgcttttatactcggggtagagaaggaatccaagagcagatgcacgttcccctctgaatgacactctcaggttcttgctggggttgggccaagttcagcacacacatcctcaccagcacccatcctggcacaggctggggctcacgcacagtgccctgcgggtgtcctgccagcacttgctcccccagccttcactgtgcttggctttcagcctctctggacacttcctgggaccacccacgatagcccttcatcttctctcagcatgattttccagtaggattagtctaaccataaatgccataggccttctggccctccaaaaaaaatcccttttctttgtgaagtaataattagactcttaaatctgcaaagaaaactgtttatcttacaaatttattctttttattgggccacacatatccaagatagaaagataaaaggaaaacagatacaggccatcacttagagtgatgtatagtgaggcagggctcatcctcaagttctgcaaaatgttccacagtgcagggcggccgtatcgctatttttatctgtaatgtggcctgggcaagtccttcccaaaagctccaggagaaatatgccctctctcatttctcctgcagtgtcttcttttttgtgatttttttttttttgaagattcagggggtacatgtgcaggtgtgtggcatgagtatattgcgtgatgctgaggtttgaacttctaatgatcttgctgtctaagtagtgagcatagcggtcgataggtaatttttcaaccttgctcccctccctacctcccctgcccttggaatccccagtgtccatatatatttttttgagacagggtcttgctgtgttacccaggctggagtgcagtggcgtgatcccggctcattgcagcctcgacctctcgagttcaagcaattcttgtgcctcagcctccccggtagctgggactacaggcatgccccaccacacccagctaatttttgtatttttagttttgccatggttttgccatgttgcccaggctggtctggaactcctgacctcaagtgatctacccacctcggtgtcccaaagtgccaggattacaggtgtgcaccaccacacctggcctccagtgtctattgtccccacctctgtgtccatggtacccaatgcttagttcccccttataagagaacatgaggacattctcctgcagctttattccacagtggctccttgctactgctctctggcgggctcctctggaagaagctttatgggaaggtccagagcatgccacaggaggccccgcaggaattacccttctttttttttttatttttcatattttgagacagagtctcactctgttgcccaggctggagtatggtggtgcgatctcagctcaccgcaacctccacctcccaggctcaagcgattctcctgcttcagcctcccgagtagctgggattacaagcacacatcactaccacctggctagtttttgtatttttagtagggatggggtttcaccctgttggccaggctagtcttgagctcctgacctcaaatgatccacccgcctcagcctcccaaagtgttgggattacagacataagccaccatgcccggcccaataattacacttctgaaacctgcccctgcctaccttcatcctgaagccaacatccaggacaccttagtcctgcttataattcaaatcaacagtgattggcctcctaacttaaattaggtatctcgactatgttgccaggagcacttgggcagaattttaatcaggctcatcattatttgaagctgaccttcatgattccagcaaaagggaagctgagggaggccgggagggcaaatgcagcatgctcagggttggggtgggtgggagtgggagaagggtagaaggagatggccttgccactgtctaaagctagggtatgtggttggctggaaatgacatctagccatcactccttctggcagcagctccttgtagattcaacctgcaggacatagagccactgtgaccatatgtagagcatttgtctgatggtgactttgcaacactctcttgtgtccatttgccctgatcaataagccatctttgggggcctttccacattcatttgggcaaccacaatctagggcttggtggagtgactttgagttctagatgtggatgagcctaacttcctacttgtgcaaaattataggaaaaaaaagctaggtaattataccctttgaatagctctccaatgatggttagaagagttggggagaataggattaaagtgagatttcaaatataaataactgtgccagggtgatgatatggtcgtacacagtccaactgcagagagaatgctccaagccaagagtttccacagttgcttagagcgaatactcaaataagaattaaatgtctcggacccagtgtagtggcttatgcctataatcctagctctttgggaggctgaggcggaaagattgcttgaggccaggagttcaagaccagcctgggcaagatagcaagaccctgtctgtgcaaaaaatagaaacttagcaaggcatggtggcctgcacctgtaatcccagctacttgggaagctaaggcaggaggatcccttgtgcccaggagtttgaagttgcaacaagctgtgattgtgccactgcactctagcttgggtgacaaaatgagacgctgtctcaaaaaaaaaaaaaaagaattaaatgtgttgtccttcatctttctcatggtctacaagtctgccgcttttggctgttagcagagaacaccaggaacagacgttgaggaataaaagcagtttgcattttccattgcttggaaggcacagatcttatttattgtgatctctgcagaacccgcagatctcattatcccagaaggttcccttgttctcctagtgggatttaccatgaggcctagagggtgggctggaagctacggtgaggatcaccccgctatcctcaggagcttagattctgtgccaggccttcaggctcctgctctgtggggatgtccatgattctggaagaaaagtgagcccagagaaggttctcttgcttctcctcctcgattccccaattgtgacctctttggcagtgtgatgtcaggcctcgggggctgcaataacatatcctccaaccactagacatttttccagttttatttactattatgtcccacaatttctttgcagaaggcagccatatgtaaattttattccgttttctaatggtttgggttacataacaaataacagcaggaaggaaaatttgtatcgatacttgacagaggaagttctcaagtcactgcaaaaagatgtgtctgcagtgctgtaagtttatgggagttttgcagctgagtctctgcatatgactttgaatatgtcactatatgtttatcatgggctaattgtggaatcacatttccatactttttcttctccctttcatgagattacaccagccagtgatggatacaagactctacaaggaagaaatgatcagttttggataattttctttcctgtcccaaaatagccatatgtctgcatgtcttagggactcagctgacacacattttttttaatttgttgcttgctataatgcaaatatgatttcagtcccatagtgaactctacagtgagtccatattataaattaatcagattcaacaaacaccaacatttttaaacttttgaaaaaaatatttaataggaactaagcaaaagaagaaatcaaaccagctgctgacacagctgtttcttttcttgtttaattcagttcaatataaaggtaccatatgctgcttaaaatggtgataggaaagatgaaataatttaagagaataacaagaaaatacatgaattgtcagcattctgtcagatttaaagaatgaaatagacaggtgtagtattgacatgtttaactttgtgtggtgttagcagttttggtgcgaacaactcctgacatgtgctgaagtgatgtgagaacgtttctccttcgctgcagacattggcgaggaggctgggagatctgccggcgtccagcaaccagcgctgcttcgcgacagaagcctgggctcggccatgaaggactgcccgtactgtgggaaaactttccggacatcccatcaccttaaggtgcacctgaggatacacacaggtgagaagtctgagtgcatccaggggcacagcccagagaaggaggaggtccccgtcctgcctgctttctggcccaggtccacagctgtgtgggtcactaactctggaaggttctccctgggcctgtctagccaccattgtatggctcagaagcggccctcatttcctgattcgtcacttaactaacattcacctcgcaaatgactcagggactcgtaaatgtagacttggatggtcctggcctgggataactgggtcgcgtctgagcctctagggcgttttgctaatggtttccttctgctgtattgaaggagtccctccccaggcgcctgtatgaaccaggagtctcccaggtgtcagtgatggggtctcagctcaaaccttcctaagtgcagaagggaatgaagccacttccccaagcatccaggtagaataggctttagcccagcctgtgttacatgcccagacctgggacagggcagctggagtccatcctcgtcactccatgtggcgtggtggaaaagtgactcttccctgtatctcctcaaagaagaaattgagatgctcttaggcaaaggggggcaagtggctgctgcacccctctggccatttctcatgttttggcgtcatactggacgaggactggctggcaacagggagttctgtgtgtccctcagtcaccgtcctttttagctttctgcttgttgcttgcacattgccaatataaaaaaaaaaatctatcggagatatggacacttccattttctttgattttcctcctgacactttatctattggagtatgagctgcttcagaggctagacaaatatgccatctattttcaaaaataattgtggtttatttcccaaggaatcaataaggctctgggttgcacaggaatattgagtgcacgcgggctgcatgggcatcgcgtggggggagacaagaaacccctcacctggtgcctcacctggtccccacaaatctccctgacaccgagggaagcctgaggacagatgggcacaggaggccatgggccgagtcaccagccctgttcatcctgcatgcctctcttggagtcatctcaggccaaagaggtgtcttttaaaatggtcctccaggtcccaccactctcccaaaaggcctcatgcgacctgcccatgccttgccccggccccatcctgcccccttcttcatccttggcacctttctgaaacaccacctgcattctccctgttcttccaatgcagaatgcctgttccagctgcaggacctgtgttcctgcccctccctccacctggaatcttcctccaggtggtccctggggacttagctttactgggatctattcggagaggctgcccctgactatcccacctaaaacagccctcacatcccctgcaattatcttctttataaacttaacaatttcagaaatgaccctgttgggctccatcgcttatttgtctcccaccaaacagagtctaagatttgcacaggtggcaatattgtctatcttttgaattgctgtcatttctataaccccagggtctgcaagggcactttacacccagtaggggcagatgaatttatctgaaaggttgaatgacagaagaaatgctcaaataagtgagtgactcctcctgtcttccctgcattgttcaaggtggcgcagaggagtcaagggctgtagggaaagtggccccttccccagggaacacaggaacctatcagaaaccacagcctgacagtcaggctgcaagtgctggttgcttgggcatagacaaagtggaagatcctcttccccgggagttcagggagggggccttgcattctgaactcagggtctttgccctttgaacttctctgccagatagttgcatggcttgctgcttccccttcagagtctggctctgatgcccccttctctgtgaggcccacccacatggcagtggaccccccgccccaccaggactttctagaccgctttccttccctgtgtcacttctctccatagtgctcacagcatctgacacaccatgcatttgtatttcgttgttgtttctctccatgcactagactgtgaactccttgagagcaaaggctgtgtctgtttgtccagctgtgtccccagcctagaacagagcctggcccaggtaggcactcagaaagtatttgctgacccaggcattcctgcgtcaattcgtgaaagtgaccaggctcgaaggcagtcagcccagacatctggttttctcagatgatgccaatgtccattttcctccccagattggagccagggttgtggtggtggttgggcagggtggggacccgcagactgccaggatacgggaggtggtccacagggcacccatgcttgagctgcctgcaggagtgtggaaaccaggctaggcatgtcttgtcttgtgtatttcatgtcgacacagaaccctggaccacatttcccagccaggtggtaactctccatgggtaacgtcagccttgcagggtgtaagagtcagtgaggaaaggcggtgcctctcaacgaggggctccactaaccctgtcggcccaagaccagtcagcttcccggggggtaagagaagacactccacagaatatttccaggcaacttaggaccaaagctgacagaagttctggataacctgggagagagcaaatggttattgctcttcgcagttttcaagcttgagaaagactaatgtttctgaacttctgcttcacaaaccttggaatactcttcggagacattgagagagacaacatagggccatggacagaggcattctggaaacttcctagaatcagagagaaaatgaaagaagccatggaaacatcacaccacctccaccacccctcggaagcagcattcgccgtatgtaaaaggcagaatggtaaccagataaagatcaattacctttttatctaagaacaaagaagctggaaaatgcttacacttgtgcatttgaatagaacagaaagtgttacatgttataaatcacccaaataaacatctattatgacaatgtaaaagtgtagattacacaagtaattaaaaatcacaatcaacgtatttgttaataagtgatttcatgtgggactcaagttggtgagaggccctgactgcctctcttttggccctggtgtctctccttgctccaaataccatacagtttttgtatttctaaatgacatggccagaggacagcagtcttattacaaaacaaaaatacatgtactccaaaatgccatctttttgaagtttttaaaccatggacccatatgagcacatttaaaaacccaacgtgtaatataaatatatttttaattgggatatcagatggcaccttctctgtattttttctgtccgactgcatctttattggaagtctcgatcatgtaacatcaatggataaaacctctctcctttttctccccactgcattaactcaattactgtttctcttctcctaacacctgtttgttggagaggtgctgactagatgcaccagtcaggttgttctgaacatctgggagcccgagagagcctatgggtcactaggatgtttctgatgcaccctaagcttcagccaggtcctcaggggaccaaggggaggctgctgcaggatctcgggagtccctaaggccatcagatcctggaggctgcctcactctggctccaggcagggcagacgttgatggctgcttgacccagaggtggctgaacttctctcctcatggagacattaccctgggcagactagggtccaataactggatatggacaatttttattctacagcacagtgtctgtgattcaaattcagagcccattattgcaggctcagaaaggagattgcatcagtcagggttctccagagaaacagcaccgataggaaatgtatatatggccaggcacagtggctcatacctgtaatcccagcactttgggaggccgaggcgggaggattgtttgagcccaggagttcaagaccagcctgggccacatagtgagaccccatctctataaaaggaaagaaaggaaagaaaagaaaaggaaagaaagaaaagaaaagaaaaagaaaagaaaaggagatatgcaccccccccacacacacacacgcacacaggagatttataagaaattggctcaagtgattatggaggctgagaagtcctaagatccaagatctgtaattggtgagctggagactcaggagagctgatggtgtaaattccagttcaagtctgagccagaatgcagatcaatgtcccagctgaaagacagccaggcaaagcgagtgcactcccccttgctcagccttttgttctattcatgccttcaacggattggacaaggtgcacccacattggagagggccaccttctttactcagcccacccattcaaacgttcatctcatccagaaacacccccatggacacacccagaagaatccttaaccaaatatctgggcaccctgtggcccagtcaaattgacacacaaaaattaaccatcacagaaatacatcagcaaacatctagttgtaacatgcaatggggagggcgcatgtccccagagtctcctgagaggttggcaaatcatttcaggattggtctccatgcacccatgccattcttttcctccatgtcccctccctgtgcactaccttgggaagccaggtgcctgggggtactctggaaggtctgatgtatctgttttgtgtgtacaggaagcaggcagatgctgacaggtccctgaaagcctgggggaggcgtgaccccctggtgggtgagcacctcatgcgtggctgcgggactcctggctgggttccctaccgaggctctcccatgtgtgggtttttcgggatggggttgttgtctcaaggaatgaccattgtagagaaatgtaataagcaacttcactcgtgaaaacttggaggcatgaaagttcagggactaattaaaaataaatctcattagtttcttctccctctcgagttctgtgagtggtttattaatctggttttgatgtgccgcatgttccagccccgagtcgggaacctctttgtgggaatggatccgcacagggaagtcagtggtggtttcccagggatttcagctgtggtcacgaggggttcagcattgggctgaagggtacgcccggcaccccccaactcctggctgctgtcttcacggcacagctcctggatgctggctgggctctcacctgtattcttgtccctttcctataggaccaaggaggattgtggaagggagggcgttctcccttgcagcccccaaagggctgcacacccagtcgggtgtagggagggagacctggacattatcttgccttgtgactacaaagcctgacagcaactggctgaacacagaactcagcccgcagggatggagtaacggcacaataacagtgatggtagttcccacgttctatccacgcccatatgcaggctctgtgctagacactttgcattaactcgctccttcatccctacagcacctcagtcaccaaggctccatcccctgccccgcttcaggggagggcgctgagcctcagagacagagaggtgaagttatcccatcccggagttgtccaggcttggattaaaggttataatcagatctgcctaattcagaatctcattctcttcaccgctgcattgtattgctactttttacttttctgagtgaatttctggcttgttttagggaattaatgcaacatttctttgacagtgtgtgtccacaccatacccaacaggaaggaaagaagtgacttgtactcacaagtggtgttggcgcagcctccagggaatttaaaagggaagtactgtgcaccccagctcctccttgacccctccctcagactggccccaggccaggcttccttggccccacgtgcttgggtttccccactagcacagcgaggttaggggtgaggcatggccactgtggcatgtggaggcgctctgacctcctgggatggaaacggggtgggggtgagtgggagtggaatcacttccagcatcacagagctgataaactcatgctatggtggaaaccacctttcatcttcaaagtgcttcccgagcagtggctggtacataaacatgggtggaaatgaaacttccagccggccccatccaggtgccttatggctggtgtctacgtctcttacatttgatgcttctatgtaaggtatctaggctgttttcacacactgagtaaatataaaagcactttgcatacattttcaaaaaggaatcagttaaaatgggtgttcttctcatttccttttccaaaaagagagcatgcatttttgccgttagtgggggaccaaccacctgagtaatgatgaaaaaaaaaaaaaaatctccaaaaggagataagtctttttttctttttgttttgaattaaaattccatcatttttctatatctgagaggaactaaaagcccggtttattcctcctctgttccctatccttgcttttcctgccttaatgacatcctaaacttttgttgaaaataattgattgaatttaaatttccttaaaagttgaagaggtaatgttacagtataaatttcctaccaaacactaagtagggaaatatccattagtgaaattaactacagtttctaggtagctaacaatgtgctgtatacagtagggcatggctaatgaacactgcagtgggtgatatttcattatacaaattaatgctcacattttaatgggaaagtcacataatgaatctgggcttcagtgacagcaattagagacacagattgtccccttctggacaaggcactgtttagcaataagcagctgtgtgaaaagtcttcaggtttacaacatatatatgctttgggggaattagtgtacaatttatattaatgtactgaagctttgctgcaaagacaccaccatatttatctctcctggtgttaactaagtgaagagatggagaaggactaaataaatatcaaattgaggatgcaaatacaggaaaatattcagttgctcaacttaaaagtgaaacacttttggagatttagcaaaaaaaacaaaaacaaaataaaaaaacgagaagcatgaatcacatcttaaaccttaaaatggtttccaaagagaatatgaatccacctgttatttttggagaggtgctggtgggaacttgctctaaatagctctagaataactccctggaacagtgagggttcctttgacatatcaacagcaaagtagaggctcagaattataaaagatatgagcatgtaaaaataggtaccgtgaactaattaaaccacctggtcgtatatttctagaaattgatgatacagtgacttgggagaggttatcaatgatattctaaagctaaatctatatcttatgccatgtgtcagtgggaagctggcttactgtacgacagtgccaataatttcattaatcaattggaatgatgaactgcggccttttaatttcattatgccttttctagcaaaactcttctttctagaaattcattgtttgggcccacatcttactccttaaaatatagtgagaggtttccccgcagaaggctaccagtgttcgtagctgcttcctttagtgggcaaagagccccattctgcacatttcacaatgactgcctgctccagaccccatctgtaaaatagagcactgtgacccttcagtgtttgaaaagttttgagataggtactaatatttaaaaattaagatactgcacacagaaacctcatagatatgacacttttcttttttctagagacagggtctcactctatcccccaggttggtgtgcagtggtgcaatcatagctcattgcagcctccaactcctggactcaagcgatcctcctgcctcagcctcccaagtagcttagaccacaggtgtgtgacaccacacctgcttaatttttaaattttttgtagaaacgaggtctccctgtgttgcccatgctggtcttaaactcctgggcccaagtgatcttcctgcctggcctcccaaagtgctagggttacaggcctgagccaccatgcctggccgagacttttcttggaaaatcaaaggttctagtgcccacagttggttagagttgagtgacactgtgctccaggagagaacggctgttttgcatactcatctgatctgtgtggttctgcctgcatgcaagtgtgtggcacatataacagataaacacaaagcaatgaaccacaaacatcatggaggtcaccataggactcttgaccccctggaaaccttgggaggcagcctgagtggtcccctcagtagatgggactcatttatggcctaagtggccaatcactcaactagacagagctgctggcagggtctggggctgcctgtaccatggggctgcccaggcaatgcagacctgagtctcaggcagagtccagccttggttgggcagggctaggcaggcccaatgcctggctcttttggcatggatctggccatgtccggaggcctgggatttgctagagttagcccagagcgcttgggtagaagagcacatccagatgcagaggccttggctgggaagcggttctcagctcaggtagactcagcatctgcctgtgccggccaaatgaaagagcagatgtagaccgcaccccggagcctgtgaaatgtgctgttaggcctctccttgtggttgctgccccaccccgtctaggccaacgttgtaagtagtttgcctcctgagcactctgaaatgggccctctgaggaaagaatgcctgggaaacagctgggatgtttccagtggagcacaagaccctggggctgctggggctctaaggaggttcacagctcaacctctgggtgtgcctggctagaaacatgccctggccggggctcactttcatctccaaagccttcccctgtgccccttgttggataggaagcccggaaagggaagcgagggctttgagatagagggcaggggtggttcttccaatcatttagcgattacgaggaaattaaaattgagcttgtttctttgtgaacataagtccaaaggggaagggtttatcccctggaacagcgtgcccacctggagcacttaactgaggaactgggatgatcggaagaaaccacccaaaccaagccctttagcgacccggcaggaggtggaactgtatagagaaatggacagaaagagcaatgcagccctttcatcccagtgcagaaggcagaggaagcatgggtggagaactttctagaaccttgcatagcacgtgcattcagaaaacccttgaaagctcatgaagcagcccctaattcaccaggcctgggcccgtggagactccaatgctaggaattagcctttcttgtttctcagctctggcttttattctctggagcagtgagggccaaggcctattttgaactctaaagacagtgggtggagtgaagggatgctatcttcctgtgcactcgcatgctgtgtgtgagtgtgagagtgcgtgtgcgtgaactctgctagcctgctatatgatatgtctcctccaaaagccatgagagcagagaacctacctctttggtctttactcagtttccagggtcaagaagggaggtttcaggtgtttattcattcatccattggttcactccatcaaaaaaatgtgtgtgaatcaaactgaaggtttctgagtcagtgggtgacaagtatgtgcacaagtagcactggctctattcaggagacttagtttactcctaaacgagcttaggattggcgtgagaccccacagaacatgtgcttcaacatgtcttattacaggttgaggaagaaaaagtcccaagaccaggattctgtgtccagtggaattcagagtagcgtgggtgtccagtccctagtccagattctcaaatacctcctgaggtctagactgtcttccctgctaaaccattcatggttcccacttcaaaggcacttccaaggaaggctgcctacaatggttccccactcaggatccacagagggccacctgggaaagtcccgaaagatcccgaaaccaagtttgcatctttggccaattaactcagaatgtggggaggtgggaccaggtatcagcacttcatcaagcccccaaggcaattccaggatggtttttcaagggattgtctttacatgtctgcaccagaatcatagggacgcttacaaggccaacttctgcgccgaccccagacccagggaatcagaactgctgtgccttagggccagaactggtgtcttaccacactcccctggtggttctaatgcacaatacagtttaagtactacccgctcccatatgtcttttttttttttttttttttttttttttttgagatggagtcttgctctgtcgcccaggctggagtgcagtggcgccatctcggctcactgcaagctccgcctcccgggtttacgccattctcctgcctcagcctcccaagtagctgggactacaggcacccaccaccacgcccggctaattgtttgtatttttagtagagacggggtttcatcatgttagccaggatggtctcgatctcctgaccttgtgatcctcttgcctcggcctcccaaagtactgggattacaggtgtgagccactgcgcttggcctcctgtgtgcctttcaaacatgtatccattggaaatagacacacacatcctctgtgcatccccacagtccccacccagaaaggcagccctccacattcccaggcttgagaggaaagtccaccttccccctctttagctccgctaatgaatgcccgtgctttctctatggcccctttgcctgccagatgcacataatcatttccaggtgcatttctaaaacacagcctgagtcccaccaggcacctgcgggcctcacctctgcaggctttcatcgcctggccctcccgcagggcttgctctcactcgtagggcaggatcttgagtttctaggtaggcttgcctgctgtgggccccatcacaacccctctaagtttcggggactgcctctgttacacctgatcactgggcttccagataagctgaatcagccatgacatcctgctgcccagaagtgccccatcccagcctggcctgcgatgggatgtctacatagcagtagctcaatgagtctgagtctaacctgggactgactccaagaagggggaaattactgcctgaaattctctgtgcctttaccccaaaggggatagagacttcctcctagattcctgtcattggtctagctagagatgactgtgacctttacgtttagagaaacagattccctgctgggttcccttcctagacctaagggccacctctgaaaaagtgtccaggagagatctcagctgctcatagcaactggcacccttgttctgataaggcaggcagggtaaccacggttctggcacgtgatctggagatgacatggcatctcctgctcagaaccaggctggtggccctcttgctcacaaagtccacgcccccaaatgccctgtgcctggagaactgggactcatgccttccgctgagactagacacagtgaaatgtcttcagaagacaccattcactgacgatttgttgttactttttagatcagtctattttacaatagaacagaggaaggggagggggaatagttgaggttcctggaagaaataattgtggatattgacagggcaccattgtgaataagagagcggggactgtcacagtccccattccttccagagagccttttgattgcaaagtctggaaaagacctgggattgctaacaaattcttggaatatatttaaatctgcagtcgtttaccttcttccccttctctatcccacaatgccagcaaatgtaagttgtctcttctggtatctttttccaccgtggaaagaacaatagaagttgggggtgttgaatttaaataaatatttaattcatgaaaattatcttatatgttttaaaacactctttaaagctatttttattctctagaaagcgcttattataggtaaattacacattttactaccggagcattaggtttgccattagtacaaatttaaggcactacaaagaccagtagataatgttaatttcaaatacagaaactaaatatattttgtgcctttttattactcattttcttttaagttttattgactgctttttatcttaactatatgtctttacatgctgcaatcataatgcactgtaatggtattaatattttatagaatatgtatttatagttctttatttagaaacagtgcagtaggtctgcagatatctgagcccgtctggaatggtgccctccaaataatgataaattacttgtgcagtatgccatttgctaattatatccatgatttactgcagagcaagacttaaatcattcatttcagtcttgcgtaacagtgccataaaatttttaggtttaaaaatggtttccatgtgtataatttaaacaaattttagatctattgtatacacaaaatattgcaaccacccatttgttacatactttctctttttaaacttctacttttaatgatcactgtggctgaaattattatgcttaattttcataatcatagcttttaaatctacagccgttttcacatgttagataaagaaaaagatagctaattgtgtgtagatagtatgtcattcctgaatagtcccaaatggtacaaaatcattaaaaaagcttaagagtacgaattattcttctattaaaaaacagttgttctctaattattagtttgagctgctttgtttcaaagaacaaatgttgatccttccagcctcgttcagcacaccaaaatgagataaacgcctcttttttttcttatatcaaaatcttgcaggtgagaaaccctacaagtgtccgcactgtgactatgccggcacgcagtcagcatccttaaaataccacttagagcgacaccatcgggagcggcagaacggggctgggccgctgtctgggcaacccccaaatcaagaccacaaggatgagatgtcaagcaaagcttctctgttcatcaggccagacatcctgaggggggccttcaagggtctccctggaatcgacttcagaggaggccctgcatctcagcagtggacatcaggggttctctcctctggagatcactcggggcaggccacgggcatgtcttcggaggtcccctcagatgctctgaaaggcactgaccttccttccaaaagcacccacttctctgagatcggaagagcttatcaaagcattgtgagcaacggtgtgaatttccaagggtccttgcaagctttcatggacagttttgtcctcagttccttgaagaaggagaaggacatgaaggacaaagccctggctgaccccccttccatgaaagtccacggagtggatggtggtgaggagaaacccagtggcaagtcctcccagaggaagtccgagaaatctcagtatgaacccctggacttgtctgtgcggccagatgccgcctccctcccgggctcctcggtaactgtgcaggacagcattgcatggcacggctgcttgttttgtgctttcacaacgtcctccatggagctcatggcccttcatctccaggccaaccacctgggcaaagcgaaacgcaaagataacaccatcggggtcacagtcaactgcaaagaccaagcccgggaggcgagtaagatggccctgctgccctcgttacaatcaaacaaagacctgggcctctccaatatgatcagctctctagactctgcttctgagaagatggcccaaggtcagctcaaggagactctgggagagcagaagagcggtgcatggaccggccacgtggaccctgcattttgtaacttcccatcagacttctacaagcagtttggtgtttacccaggcatggttggctcaggggcctccagttcctgccccaacaaggagcctgatggaaaggcccactctgaagaggatgtccccatcctgatccccgaaaccacgagtaagaacactactgatgacctctctgacattgcctcctcagaggacatggactcctccaagggggagaacaacgatgaagaggatgttgaaaccgaaccggaaatgatgaccaagccactgtctgccctcagcaaagacagcagcagcgatggcggggacagcctgcagcccacaggcacctcccagcccgtccagggactggtctcacctttatcccaagcaccggagaagcagtggcacagccagggtcttctccaagcccaggaccccttggcgggcctgccaaagccggagcgggggccccagagcctggacaagccgatgaacatgctgtcggtcctcagggcctacagttctgatggcttagcagcctttaacggacttgcaagtagcacagcaaattctggatgtatcaagaggccagacttgtgtggtaagttttagaatcctcttcctatagttcatttcccaaaacatcagtgctgaattgtgcatttaaaaaaatgaggtagacttatccatgagcaacttttgaatgaaatatttgaaaaaaccctcaatgctgtatctgcaatgtagacaatcataaaagtccattttgtttagaagttttagaactcatacttttgtgttctaatttgcattataatgtactaaaatgcctgtacagaaggcatggaaaagggggtggtcgctcaccatgtgaactactcctgtttgccatctagaacttgaaggggggaaaatcgacttacaaaacaaaaatgaaaagagacatggtaacttgcaaattcttcagtattttcaatttatgcaaaagatgcctaaagacaattccttactgctttgctaagccaaatctgctttcttaaacttttcttttattgacttagaggatactaaaatcatatcacactaacaacagtatggaaataaagcgaccttctctccaaagagggagatggtttctgggtgtttgtgactcatttttagacaaaccaaatggcagttactgtgactttggccttctgcgcttgccttctgtttgtctgtctgttcacctgtctgtctgttgctctaacaagacatgtacattgtgaagtccctgaacagtagtggtgtgaccctgtgcatcttggattcatgcttgtctgatcctgtagcaaactgacacttctttatctccttaaagcatatgggtaccccaaaggaattccagatttccgaacatcattgtaagtttaaggactaggtttggatcaaatgaatgtttgggtgggcagggggaatcaaagtcattgtcttggcaccctgatatctgtatttggaagcctttctccgaaaagaagctccatgcattcttccctttgaaaccagctccaaatatcctcaccagagacaaatgaccatgatacatttccaactgtaatttatgaatggatttctgtaattttacttcacctgtggaaggaaggcaggaaggcaggaaggcaggaagggaggagggcaggatggaaagaaggaaggaaggaagggaagggaaggaaagaaaagggaaggaagggggggaaatagaagagagtatttttgaacctcaacatcctgttgttcgtttaagcacagagaagaattcaggaagctagactctgggttcataatttagattgatatatttcttttattcctcttcttccctaattcactaggaactgaatcaagcggtcagaaatatttttttgaattgtcgaaaatcactaaatggatttctgacagctcaaaaaaatattgacagttccttatgctgaatgattcacaaggccccattaaccactacccccagatctatttttagccacatacaattcattacttttgaagctgttaaaaacaatatttaaaagaagggaaaaaagcgttttatgttagtccaaattttttccccttttttttttaaactgggggagcaatgttgaaggcttttttttctttttttcattgttgttttaggtttgtgatcggggtggtttcttttttattgttgtttagagtcttttttttttttaagtctattttcagttctttcaactacctacgtaggaccatagtccctgccaggaatccatgcatcagaaaagatcaaaacctggcatgttcatgagctcattattattgaaatgagctcatattacccctattaattttcccatcttcctatcagtaatgaaggaaggctgcctggctcgaggaagtttgcccagtggtatcctttcgcaccaggcgaggttgaatgggaagccaacgtcagggagcctgccgggtcttgagagccttttatctctgggctgcaagctcctaggaacttctcaccttttcccaaaacagcagcacacgacacgtccctgacatttccccgctatgtgcaaaccgtgttgcccagtccacccttcagcctttgggcagcagatcctgggatgtaagttgtgccccccacccctcgcctctttcatggggcttggggaccctcatgtcagccaagcttgaaggcttcctggttgcttctgcagcagagggttcaggccccttgttccgccttccactcctgggaagatgctgaaattgactctggccacgagctgcctatttttagagagtgtgagttctgcattccatttggccccatttcttctgtgtcctcttgctttagtttggaagtaggcaggaaaagaccctccctggctcttgcatttgcttgggggtggggccactgccctcttgcctctaggatgggcctgactctgccagttctcatcccactccccccatatctggcccaccataattgcagtcctcttcttattttcttgcgggctactgtgatatcccagaaggtccagacatattcatcctttctaaaagttacaacctaggaggaacacaaatccaaatgggctgttttttttttcttaaatagtgtaattcactctctttttagcatggcaagaagcacaagtgacatttgtaagcttcaaacccccactagcttccctttgcaagggtagaagtgatattagcacaatgaataaaatatttctaatgtttattcctccttctcttcttcactcaaagtaggtatgggtttctaaatccgcctaccaggctgatcactatttctccttaagaatctgggctttgtcagaccaaagcatcattcctagatttctcatctcagatggataaagttgagggctggttttgtctggttagtagacctaaatccccactttcatgattatagaaacaggcttataggaggagctaatgttcccatgtttcttaaggaagggctctgttctcaaggggtgtaaaagtgtttgaacaagcatcagaaatacctagttcaaatcatataaactccccacagatctcagcagctcctccaacccttgctgttgatttggagaaggtggcatctcaccctattctgtgggtgatactcatattgcaggctgtactttcaggatcttccatcatttctgcatgccttcttcctaacttttaaaactctggtcctaaattccttggtgccatagagccagggtcctggccagtgtgccctgcccatcctaacagccaatggattcctaactctggtgcagaaggagagccaccgaggggagaagccgacccagccagttgggtggggagacgcctgttgcatatgacagtgtcgagagcttcagtgggaattttctaaagctctttccacagaggacagcacacggcctgtcagagacatattacaataatcccaaggaagaggttaagccatcttggattaagccagaggacaggcatctttgcttccacagtgggtcagatcccactaggggtctgatctcattataggaaatcccactccaatcaaatccttagtttcttgaggtgacttccagtctccaggcatgggtcacatgtctttattctgtcaaagagcataatgtacaagggtactccagtgccatcggagaatttggatatgcccttggttttattggaatgtttgaccttggttttgtaatgggatagactccacatgagtatttaaaggtggagaggggaagaccagagcagtgtttgcatccatggacaaagcaaggcagataagcccagtctagtctgagaaatgctaatgcactgttgggtcggcacttggctgggaaggggcaggcttccctgtgcacacagcaccaaggctggtctgcacagcacccatggggcccactgcatggaacggttaaaaagtgtgtttcatctgggagtttgtggatttggacagcaaccagatcacccttactccttgcctttcaaacctaagagagatggccagggtgtggagttgttgtgtgccaggtctcccagtcaggctttgcactgtgtcctttggtggacccaggggtaggcaggacagagaagaatgaatgacagatgaacgggaaagcagggaaaagagcacactcccctttgccccaaggagctctgctctgtagtgactgccactcagggaaggctggctgaactggtagcatctgtaagcaggctgagggcaggcactgcggctcacacctgtaatcccagcactctgggaggctgaggcaggggcgttgcataagcccaggagttcaaggccactgtgagctaggatcatgacattgcactcgagcctgggtgacagagtgaaaccccttctgtaaaataaacatgaaataaatatcagcaagttgattgtgggcacgaggccctatgtgcagtggctaccagacctagtgacccagtgggcctgggaggaagtgagggagaatgcaagcccattaacagcagtcatcctaacatccccagcttatcatcctcaggttattgggcaactggcttccccaacccaaattatacctgagactatggaataaaggtcttctgggcttccacattagtgaaataattgggacccccccccctcccaagaattcgggtccattgaaacctattcaaattacatatttttatgtgtgatgagatgaaccaggacaaccaaagctgaactctcttaaaatgtgacttatcttttccctaagccttatagatttcttggcataggcagtcggagaatacctacttttttttttttttttttttttttggagatggagttttgctctgttgcctgggctggagtgcagtgtgcgatctcggctcacggcaacttccgtctcctgggttcaagcgattctcctgcctgtctcccaagtagctgggattacaggtgcacgccaccacacctggctaattttgtatttttagtagagacagggtttcatcatgttggtcaggctggtcttgaacttctgacctcaggtgatccgcccacctcagcctcccaaagtgctgggattataggcatgagccaccgcgcctggccaatacctacccttttacgagctactcagtctaaagcaacaggcagcaaatattttcttaaagggccagagaataaaagtgttggctcacaggccatggggtgtctgtggcgaccacccaactccgctttggaagtagcaccacagctaccatagacaataggaaaatgatggctgtggttgcgttctattacaactttaggtactgacaggcgatgcactggaattggcccacagggtcttatttggtcaacccctgctctggtgtaaagagggatgtgttcccgtggtcatccctagggaatgagtggtgcaaacactggtcctctgttattctgctggacagtgagatggtgatgggagacccctcatcatcagtggcagggccccatccattgtctggtaatgccaaagccagagatgtgagagagactttacagtggtagaggacttgttgacccagatgggccgatgccttgtttctgggaagccacacctctgtctatgcattaaagacttccaggagaacaccccagcacagtgcaacccagagctgccccctcatagccagcacacacagaagaggaagcgggcagtggctgtgtgttgtctctgatgcaagcttgctctgtgaaagcctgtttcctcactgatggaaggaagcgtagggatgaaatagatgatagagataaaagagcttggatcagtgcttctcagttgagtttgcatgacgtcgtggagctcagcatccacgtgaaactgttgcaaggaaatgatgtcagtgtgcaaacatcttcgggtcacaatcgtcccttaagcacggcaggcatcaaccttacctccatcagtgttagagaggcacgtttcatttcctcacttctgccgtgatgcatggttgatagctctttcttggtatgtggagaagtttgctttgaagatgattctggcaattttgtgatgacctcccatcccaatggttacactatttctgtgtccactccattctcttcctgataccaggcaagtgcttgggggtaggaaatgagtcctgccctgcctcagtctttgaccaagaaacggcaaaggtctgcagtcaattagagacttggaaggaagccatggctggggtatgaaatacacagtgagggccgcatatgtgcagacaccctgagtataggctgtgatacacaggctatggccattggtacatttttcatcttgtgcaagagtctacagtgtggcccagaagccagcaggttctaatgaagaagggaggtgaaggtaggaaaatggcataggaagacaaccacaaaatcccaatctgccgagtgtgtgggagtgcaggctgtacccagccagcacaagaaggcaattggcttgagggtgtgggagacctggggcatctccactgcaagatctttttgtctctgttgctgccttactttattcaaagacaaatgtgctctcatacctcttccttctcttttttgtgagctgattctcacatggattggcctcagagactatggataaagcacacctttgcattcacctcctttgcccaattggataatttacagattagctattgacctctatggtctggcctgctctcatttgtactgtgtgtccggggcctgacattagaccccaggagggaggaccatttggcctgccttgaagtccaagggcagaaccttgtgagttaatgcaaatcaccgccctgttctgcccctgctggctgcctcacaacctgctgcagagcttttctgtttgactctggagggacaaacacaggcgatgtcccctaggatctcttgcagaaatcagcacctggagtgggctctccccagccctcatcctgagccctgctgtgtgcactgtgtctgatggagaggcagcctctctggatggcagctctctccatattccaaaggcattcttctcctgttctccttccctctttttaaattaaatgggaatgccactgacgtgatgtcgtttgcactgcaggatgacagaactgttgtgtgaataccattgtatttgccaaatggtccactcgtcatttcagaacaaacaaatggatggtgtctgtaagtcggcaaacactggtgacatttagccttgtttatgttcctttccttttgctgcatatttttggctccaaaagctactggctgaatcaacagggcctctgaatcaggagagaagtctggtagcattaattttagttgctatgtccatattctcttcagactgcatgaatcctactgctcaggaccaagtctaggtgagaggagagggcaatcaacctctttggtttcggatgttgtgtgcaaagcccagggttcaaataagcagtaattatctcctattacttagtgctgatcaacagcacctctacgtctaattgccaacctgccctaatcatgttgactattcttgctttagccagagacagaaggaccaaattttataaataacactttattgtcattattccattaaacgattaggggatgtggccctgcccttgctttcaaatgcctctagccctgatggtttctggattatttaataaatctgcacattttcttgcaggtaagtgacactccctgtcctagtcggtctatctggacttgcccttgtctgttcgtggtcctcggtggttatctgcagcttgttaatcgtgtaaagtcaagagaagaatgtatacacatatgtgtgttgaataattactattggcataggtatgtgtatacacacggtgcaccaatctacagtatatatagcagagaatcagaggctaaaaatattaccccatatgttccagtattagtcatggattgcaaaggcttagtaacttgagcaggagagaaaactccctcaaagtcataaatcctgagtgacaactgctgctggatgacagatcccttcacctgtggacaacctggctgggggtggggggctgttccaccagctcacctgagcatgtagaggtgggtcctgcagtggtctcgtgggtattactgcttgtgtctgattgtcctgtattttgtaacactttagaagaatacagaaaagtgcagtaattctctttctccatagtatttaagcagaaatattgctagtttaatattgtgtcaggtcgtcctattaaccaggagcagatgacagtaaaatttcagtgaatagcaccttgacatctacaacttaaaaatggtgattgaagcaaaatatgtaaacttgtacggggtgatcgtgtgctttggaacagagtattgttgaagtaattagaagatatattaaggtgttcctggtaatgaaggcatgtaagttataataattgtagctttctgaataagtgtcaaactatatctttaagtgtgctgtatgctgagttacaagttaggtcatttatgaatggaatgtaaaataatactaaaaatgcttcaataacttatcttggtattgctaataaaaaaaaaaagctgtgaaacattagtgcagtttggagtcattatgttaattcattccgcaacatccccctcaccccgacattcttctcactgttggaagcctcaacaggacattcagggaatgccattgaccctgcttcttgggctgtttgccggggcagatcattgcatttttctatccactcttaggtgggccctgtgagtaacaattcataaacatgcaagtggaaaaggaccttccaatttgggtggatgactgtggggggtgggggagagccaggcgacacgggcccgtttctctgtacaagtgacttttaggtgtctagaccccacaaccgcccagaggaactgtggctggggtggtgggggtggagggtacttgggcacggagtatgccggccatcatgccccatcccagatgtggaaacgctgacacccagcctcccttcagcaaatctgaacatgttcttttcatcctgcgaaggggtagtttgtaatgaagagactcaggattcgcggaggtgggaatctttatgttctgctgaccttttcggactgtacttgtgtttgctgtaacaggcttttgcctgttgttccactttgcctcctggtggggagagaggtgtgggaagaaccgattttgctttttgcttgtgttgcttggttttgtggtccgtgagctggacttgagggtcctgccatttcaacggtgtttccaagcttctttgcttggatgtgttttgtaaatttctaaattcaatgaccatccctgagcccttgtctaactggtccttttgggggactgggggtaggacacaatctcataggacacaatctcaagctccaagtccgttcttcacaaccccaaataaataaagtgtcctctgtgtaacaagggaatggaaacccagaaatgctcattgaacaaccctggcctccgcaacaggacaattgcatcaccctagctggttgaaacatttcttccggtatttctcataaaaccttttcaagtgactctgactccaaagaccacagtatggcattaggttgtcttttattttgggaaagaggtaaaaagtgagagattcggagtctgagaagacacgataaaagcttcaaagagaaaatgtcgattgtgaagaaggttgtcagatttcctggtggtcagtgcccacgactgttgcctgattcccttcatatgaagctgggagcacataccatgggttcctttggaaactgtgatggatccctaaatgcctagcaaaggtaaagtgaatgaccctaacctccaggccccaggtctgtgtggccacatttaggcagggccagtttccactgccagtgtatataggccaagcctgtacaagaagtagggccccaggagaggtttttctttatttgcaatgtcccctgagtctaaggacctgccccaaggggaatggggtgcacatcgagggaaaaattcctccaagcctttttctcggggcctctgtccagggctgagcacactgttcctggcgttgccggtcatgtacaccccgctgcccacttcctgcaaacctggggcaccatagcacctgtgggttttgccagtcctcctgggatggggcccagaggggtatagatggcatgtggggggctgggctttggaggcagagggagtgcaaagccagtgagggagaggctgctgaagggaacggatcttcccagccctttgcattgacagcctggaaggctccctggagccgtgtattcaggcgtctgctgttctctcttcctttccatgggggcccaatccccctaacgggatctccaagctggaagactcggaagcatttccgtttctaaagcagggggtatttcctgagttgctccccggtggaaacttctcaagcttagagggggcctttgtggattctcattctcctgcttttatgaagccagctccgtcctgctccccatcttctcatttcagggcactcacgccgtacactccccctgcttcccatccacctcctcctcatcatccccatccctggttaacaacttccttctcaacagttgcgtgttcttgggaatatcccgtcttctgcctgccggggagctgggtggattcagttctgtggaatgagccaacttcattttacagctctgcaagggggtcaggaattctgtttcctgtgtgttccttccccctaagccaccttccatccccaagtgggattataacaagcccaccatccccatataccaccatccatccccacatgggaatataacaagcccacctcccccataaaccatcatccatccctacgtggatatataacaagcccacctcccctgtaaaccaccatccatccccatgtggaaatataacaagcccaccttcccccaagccaccacccatccacatgtgggattataacaaaccccacctgtttgaattcagacctgaagcaaatgtaaacatcatccattggatctaccctcagcctgagacctggacccttcctaacacgaacaccctggtctggataagagaccacccccccgccccattgtatatggagcagagttccaaggagacatctgtgacttaagatgagagaggccaaggaagggcagagtgccttgcagtaagagagtcttcagatccacttttctatttacacatgttcggaagtgtgtttgctttgatgagattgtagatattctggttggagaaaaagaatctaaatgttgggagatgattattccataagtatagtcactttttctcaaagaaacttcgcgatgattaaattacatccccaaatcggcagcagtgcattggcaatattgtctctgcgtaagcagattctgcctctggagcaagggatgcgcattttcaaggttaaagttggggaactctgcacagctatttcattagcaaaaatagccatttgtgcatccagacattggctggcttcacgaggggtttgtctttcatgttctttgtggagttgtccagacacacccatctaatggtaactcactgctcacaaggttaagttttctttttgaacttctgttgttgtcaaattaacataatatgctctcaattatccacataaaaggagaaaggcaaccaagcggggaaagcaaatttgcaattaatttaccaaattattgctctttttatatgatggacaagttgcttttttcttgagttgggatttgtctctactgggaagagagctggggttgaccacgaggacaggccactccaaggtgtgccctgcacctggggaagggctgaaggtggttttgctgaggtgcacagtggccccagtggataattagggactcacactaggattagctctttcttgtcaagtagaggggtcgttagtcctctcaatcccctaagacttccttggtgacctagttgggtctccctagagcagatcctgaggtaaggacctggatgcaggcagtagatatgggaggtgacccaggaagcatgagtgagggagcagggaagggagacagagaaggcaggtaaatcaacaagcacaggtgcactcatgagagggtcagtactgcaggaccatgggggctcagcccctttgggggtcctctaaggtactacgtggagctcctcttggaacagtctcttcaaggattgaaggagccggggtatttacacaccagcttttcctctcccagcagctgagggtccctccagcccacctgatggccaaccattcttcccatagtgagagaaagccctcaggcagaatgaagcaagaggccattggtattgccagataatcagataatcagaagggaaggaatgaggaaccaacagtatctgcttcaagtgagaacaccctcttgggtacccagtagaaagtcgcagacctaccagagccacagatgagaacagatgtgcaggtcatggctcctgtggagagggaagtgcatggcctctcagcttaggggccaggttactggaggaaagactggcgggctggtctgggggagaccttgaagcaatcatgttccaaggagcttagataactcacgtgtcctctttgggcaccattttcctctcagccaaaggagggagcattccagatgtctgctccggaccctcttaggtcttaaactctatagtctccaccacccttttccagtcctcacttttcagatgactcctccggaccctgtcagtcctggagtccccataccagtagggcccctgggatatgttctggtttcccacaagcataagagcatgcaggctttctatttgggcaaggccatctgccattccagtgcacgggcatatgaaacttgccttatcctgaagatatttctgttaaattagaagaagaccattgaggattttcttttaattgtggaagtctgttaaaatagcaaaagaaaagaaaagaaaggagatcaatgaaactggattttcagctcatggaaatgcaagaaaaacctgattatctgacttttttctcttttatttttcaacctgtcgagctcacagttgagcttgagaagactgtattttttatgatgatcaggttatctttgagtgctttacagataccagtgtgtgaatccaggagttcccttttggataaaagtgcctcctgctttctttcaatacatgtatccatcacacttagagggtgggaacccaggcaccgagagatacgggctcaggctctcatcttgcactcacggggcacggaagcagttcacattcacttccttctgtgcctgtgaccatcccacttttccatcctgagaattcccttggtcactcaaaatcactctgagcttgcaagcccggggtagtttggaacagtatgctctgtctctacatgggaaagctttttgctttcaattggatatcttgtcataggcatttcttaatccaattgcctcagtgttatcacccatcaaatgaggcactcgtgtatcccttaagagaataaagtgaatatgaagaacttggaggttgtcgagtcaccctcatttcaattattttaggctttctgcagccatgtaggctccaggcagagcttcgatgaagaccgagaacccgctaaaaccccgctgagtggctggagaatctgggcaggttattataaatcatggtgccccaccctcatccttgccaatttgtactcaccgctggaaggtctctttctggatggcccatctgggattcttcccatccctggggtgaacacatctggaggtctgttggggaacctatatgataattcaacaagcccattcttgcgatggacagacacacccccattggctccaactgagctgttttcactgttttctagtggtaaaaagtatttaccattaggaaatttttaaaaatcatctctcgtggccaatcggtggcccagattcttgtatcagtggtttttgggtttcattaagactttgggctctacaactgtcctttctaaatgatacccagtaatttaattttaaatcacaaagggaatgttcttgaagcctttgaggtaaatgccgctgcaaagtgaatgatcacctctaatttgcacaggttaaacacctggatgtcatgttggggtggttttgtgaagttcccagttttctttcgtgacagtgggttttgcaacaggagctgttgtgtgaggtgggtgatgggactggggtttgccaggcaggctgacctcacatcccagaagacacaggagggagaggtgctgggcgtgacggatgctctagtggtgggaagagggattcctaagggccccttgcccagcctgacaacccctgcggatgagcccaaggacaggctggggcacacaggcctggaacctccagatggacacacacaattcccactatgtcaaggtgtctctgggatgggacagcagggaggcctagccccaggggcctgggatggggggaccaagggagagggagagtgccacagaggacccaagggctaaggggaccagaaaacaagagggggtgaatggctgaaaggaagagaaatgcatgaagatagagggagagaagtgcaaatgcagttcaaagagaagaaggaggaggattaaagagaacctggagacctgggaagataaaattaaatgaaagagtcgggtgtgttggcacatgcctgtgctcccagctactcaggaggctgaggcaggaggatcacttgagcccaggaggtggaggccagactgggcaacagagcaagatctaaaaaaaagaaaaaaggaaaggagaaggtaagagagaaaacaagtaagaagagagtagaagagaaatggtggaggttgcatctggaggagaggaaagagtggaagaaatgggtaaagaggagagagagagagaaggccagcagaaatgaaaggatcctggcagggaaccttttccgaagcctcctggggctgtaggtgcccaggctgatgggatgggccatcccactgctggtggtcctggtggtcaggctggggagaagggtgctcagtggctgtgggtagggatgttggggaggcttcgagggtcagggagacccccaagcgcagcccctggcgctcgggctggagctccagcagtgcctcctcccgcttgctccactcccaccgccagtttcaggaggaaatgctgcagcttaatcagaattatttacaagataatggtccattgtttgcactgagacagatgttgtctgtgggaactttgtgttttatgctcttttccctgctctgccttcactgggtgcagatgggatggaagtaatgtgagttatgactccaaggattggaaacggggagatgctccactcctgcctgggctcggcggggccacagagctgggctggcacctggtaggcaggggtggagaacagccactgtggctgcagggctgtgattaagaaggtcttatttcctagaggggcgggtccgtgccatcgccttgtccgggaagaactctgattaagatgcacttctgtttgttgcgttgagaggtcaccgttgacatctcaaacgagggtgaccatctgctcctctttttgccaaaaggaaagctcaacccctctggggtggggaatgtgtagacccctttccttttttttttttttttaacttatcagagagcttcttcttggtcttctggagtcagttaggaagccaaatctgggcttgtgactgcctgccctgcttcttcaagggtaaggtcagctgagtgaatgacggctccatctacttacccggggagagagcatgttgcagaggaggaaagatggggtgatctggggagacttggcctgctaccggacttgttccgagccttgccccggtgggggcccaccctcctgtgaagcccgcaggtctgccaggccttcagcacttctggaccccagccacttctgcgtaaccagaaaccctctgtcattatcagaacccattttatgaatgaggaaactgaggccaagagatgctagatggcttgcccacagtcttttttctttttctttttaaatttttgtttttatatcattgcatgtggtgaagtttggacttttagtgtacccgtcacctgaatagtgaacgctgtacacaacaggtgatttttaaaccctcaccccctcccacatccccaccttctgtcatctccaatgcctgctgtctgctcttgctgtcattttctactcttccagcgcctcaggttatgaccttcccactccagggggcccctctgagcctcagcttggccagctgaacaccaggagtgaggatagctgttgcagagtcagggaggggaattccctgagacacacacctccaatgccaagcaccgaacctgatagcccatctcacagatgacagcaatcagtgtcatcaaccgcatcacaccagtcctccaagacacagcatttataacgtcaggctgtgaccaccaacaaacagaaaaaaacaaagtaataaaatatcccaggtcacgcttggatgctaaaatcaagcagtcgtggaataaagaaagtcactttcagggcaactatgtaaaatcagtcgtggcctttgggcagcctagaggagaactcagtcagccacggctcctaaccctgccccacaccctgagtgtctatgaggggtcacccagaaatcagttaccaccgggacgttttgttccgttcaaaaaccagccgtgtgggggcatcctgggtctggggcagatgactgtttccccaaaatatctccatgcccaaggaacagctccctttatcccagcagcaggatctggtcctccgaactcacccactaaccttccaagcaaagttgtaaataataaagacttcctctgtggcaagtcctgttctaagctctgtacagatgagagtacaaattagcttcttacatttcatcctcatgaaaacccaaggatgtggatggagtatttattattctcattttaagtatggggaaactgaggcaccgagcagcatcttgtcacacctaagatcactcgcatgtaaacaacggggctgagattcagagctggacagtggaggtccctgggagtggcctctccgggcagtggggggatccctgcctgtggcctctccggacagtggaagtccctgtatgtggcccctctggacagtggaggtccctgtgtgtggcctttccggacagtggaggttcctgggagtggcctctccgggcagtggagggatccctgcctgtggcctctccggacagtggaggtccccacatgtggcctctccgggtagtgggggtccctgcatgtggcctctttgggtagtggaagtccccgggagtggcttgtccaggtagtgagggtccccgcatgtggcctctctgggcagtggagggatccctgcctgtggcctttccatgcagtggaggtccctgtgtgtggcctctctgggtagtggcggtccccgcgtgtggcctctccgggtagtggcggttcctgggagtggcttctctgggcagtggaggtccctgggagtggccactcagctgcctcaccttgcgggtgcttttctgtgcctttaatacacatttgagatgcgtcaaaaataaagaaaccaaccaaaagtacataacaacagccagttcctgccagcccgccaggctcatgtcaggagagaatggggcatttctgagccacgattctgcgatttggcgatcctaacctgagacagggcctggggagcaccgtcttggagcgcgtgggcggggcactgggtagggaccaggtgtttgggttgtgaccagagtggctttgaacctgccacgtgaccctgaggagctctcctcctatcccctcagtgtcctcacctctccataaatgacaaagtcgcagtgataaccctgagtccttccatgtcacagtctgtgaatcagttctttttagggctatatttattcagtcattttccagcctcagggaaaaaaagcaaaaatctgtcatctccctccttcccccgcagcgagagggccccgaggaaacctgacccccaccttgcaattgttccctgaggtccaggtctgagggagcatagagagtgggtggcccagggctccagctgcccctccctgcccccaaccgcgacagcagcggaggtcagaccaggataatatttatcaaccttattctcattgtgccggactctgaccaaaacccggcgtcactggagatcccagattatgtcttttaaggtcccacagagccgcttcacatgtgcccaattacctctgtcaggcagggggaaggaggtctccctcggtgggtgggatctgaacttgagcttccagaggtcgatggctgggatcttaggcctttgaggctgtcactccccgatagccagaccttttctgttaaaactgtttaaattacaaaccagtaataaaaggatcatatgtgtttcccacagaacaggttctttagggctattatgataattaaaaacatatggtgcctgtaccagtctgaaggaaaccgcagatgtacaaattaggtattatataagggttttctgcttttgcccttttagaaacgtcaagctggagaagtttaaagagataaaaatggcaattgtgcagacagtaggtagcattttggttttagaatcattaaatacataaacccaatttggtttttagactttttaggaataaacagctcctgatatgtgaagaaggtgaggaaagtacccagaggttgggagtttccgggggaagaggcatcattttccacctcacgagaccttggataccatgaaatcttttgcattttctatgacattgttctgcacaaagaggagtatatttattaaatattgaattatgttaaaattgaattgatgggagcaaagatgaggatttctttacattaaactttttactttttaaaaggcaaaggtgcaagtattgattagtctagaaatagtcatttgttttaatttaaaatatgcaattgattttgagaaggtgataaatactgctaataaaaaaaaaactcaggaggatttctatgactccctgtcaatggttttccaaggcagacatacagggcaggtccaatctgctgagcttttcattggaaagggacgtcagcctggctggggacactggcaatgcccagccatgctctggggcagccgagatgacaggcccttagttctggcacagtgggaccccggtgatgggggcaaagatttagggctttgtcagtgcatgtctggtgcagaaaagcaactgggctgctctgaaggggaagggatgggcagcaggtcacaggaccatggtcttcaccagccctgcctctcagggcccctgcttttactgctcctcctgaaaataagttgggccctctctgagacaatccacctagaaccaggatggtcttgcctcatcctgcatcttttccttaatgcgatgagctggtagctgcataaggaagttaaatggagaactaaatgatgaatccataggaatcaatgagcagagaggacacaccacatatccagaagcaaagcccctggagtgctcagataaccagaatttttctaagcctagtgtgcaattgttgaaatccctaataatgagtagagatgaattttgttcaactttttttttgtgttgaggtatatatcacgtaataaattttatgataccctggtgaggttagaagaccccatagccattttttgatcatcctagctagaggaaagtctgggctaccctggagatgcatccattctttgaaatgggctctgcagccgtgttcttgggggaggtgtttggtttctctcttcctccattctcctttgccacaccttcttgatggtacaagaggtctgtcatcctcctgtgccctttcctgtgggggctatgatgggacctaccttgccactcagtctctgggttaggtgaggaagccaacctcctcagggagcttgagatggaatcgaagccagataaacgttcttttttttttttttttttttttttttttttgagacagagtttgctctgtcacccagtctggagtgcagtggcatgatctccactcactgcaacttctgcctcctgggttcaagtgattctcttgcctccgcctctgcagtagctgggattgcaggcatgcaccaccacgcctggctaatttttgtattttctagtagagacggggtttcaccatgttggccaggctggtctccaatgcctggcctcaagtgatctacccacctcggcctcctaaagagctgggattacagagccactgtacccggcccagagaagcattcttgaaccctctgtccacaacacagcaaatagccccgggggctgtggatagcagtggttctcagctaggggcaatgttctcccctgggggacacttagcaatgtctggagatattggggaggggagtgcttctggcatccaggggccagagatgctgctaaatgcctacaatgcacaggacagcccctaccacaattatctatccccagatatcagtagcaatagtgccaaggttgagataccttggtgcacagaggggagaaccaggcctctcagtgaaactccgagttggactcatggtgacaaggcaagtggcgtgccctgccatgcagctcacaccacggcatttggcgtgccccctggacaccctccctccacatcctgtcaccttcagacctcaggcgttgatgaaaaactttgtaagaagccgggtgggctggaaggcaggaacttcaagtggagtaacccggcacgttcctcccaactcaaactggcacgtggggtacggagagggtggcaggtgcagaggcagccgggagccagccttttcttctccctgtgagtgatagcaagcccacgttgttattgtgcacgtagatattaccactttaacttttacggaggtaaaataacaccttgtcactcagcataagtaccaatcacaaaatgaattaattgtaataaccgttgtcaacagaacaaaggacttgttgctttcctaagcagatttcagcgccactgagaactatatacaaacgttcccattggacaggctggcggaaaacagtcagaacataattgtatctgtctatctctttactttgtttttaagggtgaaggaattgagttaaaaacctatattttaagcatatcaataaatatacccctttttgtgttggtgaagtctcctcaaaaaacatggagtctctaataaattggccatgaaaatagcgttcgctgctgatagcacctagaagggccagctgtaggggctgcctgttgacttcaagtcatggagggaatatgcccaattactccccaataaaacaccctcttatttctgggagttatcaaaacacatcctctggacaggtggtcagctgccccccagctcctcaaaggaagataagtgggcctcacgcagggcctgtggagtgtctaactggccccacatcgacacaggcaggcttgtttgcagtcagtctctttacagttacattttatcccctttttttttgattctagtttttcatatcttagcacattttcctctttaagaagcactgtgggtactcttctgacaaaagggtcattcctgggagaggtggtcggcttcagtgggctggttcgctcaaaagtctagttcaagctgtgtccccagtagaggtgaggccattctactgggggtctttgaggcttgagaggggccaaaaggcagaggatggcttttgcaggtctgctcgggacttcagtgaaatataaagttgggaatctcccaaagaactccaaggcaagtgtgtctgacacacaggctaagtaggggtcaagatgcccaaagccctcttcagtgaggatcatgagcaatcatgcccccttcattgaacaaagatgtaaaaggcaacctgggaagctttatctgctttcatgccatggcagcaaagcagagaaagtaacttggaagactcagagggatagaacgactctttgcagtccatgcccccttcttggtgctggccctacatgtttctcatttcttccaggcccacttcctgctcctgcttctctgtgacctttggccagtgtgatcccaacatccggcttcctcccacggtctcaggcccctctcaccacaggcatgagtctcccccacagcatctctggtgccttgttagacagcctgctttatttttagggctcattgaggcctacattgggccctccatgatgaaatgaaagaatcttaggctatcagagatagaagtcatcttagaggtcacatttgatagggaggttggagagaggacttgcccttggttgtagaagcagagacaaggggtggtcttgttttcacgcatccaaattgatccctctgagtgctgtcactgtacatccaagcaaggaaggtgtttgtgtggcttgtccctgcagctttggggcatcttttcctgcagaaggactggccacttggaaacatgggtaagaggtgggcatcttggtttaatgcggccctaactgtcatggtagcccatgcctttggatttgtgtagttatctctagctaggaccaggtactacttgcagaaaaagtactgaaagagcccttctctggaaaaggaactctccctactgcttcctgaggctggtgtctgtgtgctgcgtctcacgggaaggcaggcttatccctcgcacattcatgggagaggggtgttcatcacactaaggtcccaggcccccgtcctaagagcagaatgtgaagtgggggcacccaaggggggcagctgtgggatatggagagaggagaggtgggggcagatcttgtgctgtgtggacggccattctggaaacactgtgacccctctaccctccactccctaacctcacctgccatccagcagccttgtcctggggaacgaggaaacagcattctctccaaatttgtcagaaaggagatgattccatcatggggaaggtgcatggttacttgtccatgtactttagcacatgtggcattcttgcacagcgttggcagatggtcgccaacagagtaatcaagatgacatctctcgtggggcttaccttctatggggacactgacaaacaaacaaacaaataagttcggcataggatgagtgatatgaagatgctgaggcaggaggaagagctggaccttcacatgagaaggtcaggattctataccccagagggcagggaaggcctctttgttgaagggggacattggagagagactagagacagtatcacatgtatcacatggatagagagctagagctcatcaggacttttaatggccatatacaacaaattcacctggaaaacgtggcccaacccttagacatgtgagttaagccaccttggagagaggcagatggttgctcagacccacctgcaccagacgcaccagtgtgcagaaatctgaggggggcacatattctaaggagagggtacaggaaagacaaagaccctcagatgagagaggaacagagttttggagggcttttagacctcaggacccagagatccctgtgtaagtgaacaggatttccaaggtttttccagatgttgatatttcatccaagcttctcgagggccctgtgtggtcaacagagctgggacttggggctgtttttcccatttttatagatggggaagctgatgttcaaagagaaaataatgacttgcattagtaatagtttgtggtagtgaaaggcagggctagggccccaggtctcctgactcccaataccaggctcattctgctaccctggaatacttctgcctgttcctgggactctgatgtgtcttttgaggctgaccagttgtacggtaggactactgggcctaggggaggcatcataactcattctttgcacattccccccattcctggtgaaaagaaaggttgaaacttagaagattggtcatagactttggaaacatgatactatgagaaacacagccatcctccaactcccccaagatgaaggtcttttgtcctcacggaccaagactgtccatgacagagtccatggattgaactacacccacccggtttccttttaggtatcacatggatagagagcaggagctcgtcaggacttttgatggccatacacaacaaattcacctggaaaacgtgggccaatccttggacatctgagttaagccaccttggagagaggcagatggttgctcagacctgcctgcaccatgaagtttcactccatgctgaccgtgaccagcaggggttcagcccctcctggacaccttccaacatgatggccatgacagtggtggtgccacccaaggtgcagaggagctattgccaggacgggcagctgtctttccaaaatcccagtttttgtcagggaaaactgctttcaaataaatagctgtttctggatgattctttttagtatttcttctcccagctggctgttatattgtttgcattgcataccattctgggaggcaaaaggtagcccacctttcatactagctgcaatagtatctatttcccaaaattaaaaggtcaaattaggaactatagcagccttaaaatactttatctgctctcaacttgagaagacatgtagaaaggcttcttttgtaccctaaaactatttgtgatgttctccatgcatgggggtgaatttgcaatgggatcagagaaccagggtaagcatgaaagactgggggaagagacccttcaagaaaagaagccaggatcccaggtgggttcctctgcaaagaaaggcccagaggtgcaactcccaagcccactgcctcctgctgctgagctataccttgccttggggaagttggcttgtgggtggcccccattaggtgctcaactgatgctaacggttggtcacaatagcaatgacctctttccctcactgatgcccaaggtccagccaaagacattgggcttgaatagcaagggcaggattcagcagagacaggcgttgccttaaggcctttctggcttccggtcaatccagcattcttcttacaggggagcttgcatgctcacttagcttgaagcccatgtaatcccatgctgtgaagagctcatgccaggccaggccatgtcacagcaacaaaactgaaggtatgcacttcatcatgatcaagtgtatagatctatctgtttgtatactataatatctatgtatttgttataaaataaaactaaaaatacattttttaatcaatgagtttttccctcctgacttctgctaaatcctattcgatttttttttaaaggtgagaggctaaggtctagcgtggcttgaatttagtctagtgcagccatgcatcggaaagtgatggcaggaaggctgtgggctgtagttcgtcatctgggtttgtcagtctacactgggacaggtctacacagcctgtctctgctcatgtagtccttacctccactccttgttgtctgtgcaggggattactgagttgtcaggaaacatggtcaggaggtactctgcagcagaatttatccattcattcattcattcattcattcattcagcaagcaagcattgatggaacatctctcctatgccaggcactcttctcaacattagggcatggaaatgcacaaaaacagccagaagccctagacctgtgaacctgtttctcctttgctatgccccgccgggcacttccctccatggacagcccctccatgggataggactttgttggcatggtatggtcccctactcccaggacctctcagtcagtggtggctggacaccacccctcccatccagagccttgctctgttggcctcctgaagatgatcctgcccgcccaggtggccaccaccatctattgcagcaagaggagcgagactgagggagtagcgacatctgtcttgctcagtcatccagcaaatatttcctgatggttcctgtgcaccagatcctttcctaggtatcagagacccagcggtccagaaaggaggcaaaaactcctccctgccttcaggcagctcacagtctagagggcagtgggcaaatggaataacgggtaggttagatggtgagaaggctatggagagaaataaggcaaaccaggagttagggagtgccgggggtgctgctactttccagaggtggacagagacaaggcctgtgcagtgacacccagggatttgaaggaagccagtgcgttcctcggaggatgtggggcgcacacttgggtgaggccctgaggacagcagcatgtacagttcagagaactttggagagagaatatgtagaagagggggagggacgggtcacagaaatggcctaggccttgtggccacaagagcgactccggcagaggccagcttcatggggtgtgcgccccatgcagtcccttaaggcctacactgagaagggctcggctcatggtataagggtcaagtgtgcccacattggaattcttaatgatgtttgagccaagggtcctgcatttctcttttgcagtgggtcccacagatgccatagtgcctctgaccctggcttttccaccaggcaggaaggaaagcctctgcagagcatgagacgatttggagagagcaggctgctgggcgtgggggacccatgggtgggaaggtaggaggccgggaaggaggctgttgtggtgactgagcccaggatggaggtccttgttccggtgtcagtgacgatgcagataggacactctgttccaagcctgcgtctcccgctctgtctccttcccccatcgttcctccatctccactgctatctcaagccccacctgggtcctccttctccagagccccacccctgtccttgacatcttgggagccccagtttcatggttgaacttcaatcttttccctctgtcttctttattgacttctttctgacctcctggggaattgacagctgtccagaagctgcagataggctgtgctcttctacgctagtggcgctcatgtctgatactgtgggctggacagccaggttctgttcctggtcatggggacccactgccatgcaccatccataccccctgcctcactttcctctgcagcccacagtgtccagtcccaggggactgggtgctcacagtgaggcttgtggagttttcttcctgcaaatccacctggtccacgtggggactggaggctttcttgtcctgggcaatgctttcagcaactcagccgtcttccaaggggaacagtcagacaagaggatccggcctttcctggagttgcatgtctctttagggaggcactctgcaagccggcacatccctgcctcagtttccctggttcacatgctcctcacagttgtactttaaatactcttttgcctggttttatttgtttgggatttgaagtctgttttttgttgttgttgttgttttgtttcttaaacaccttgataggttttgcaaacagcatcttgaaaagtagctttttgatttgaataagaaatgaaagcaaaagccaccaactcttcaacgattatttattgtgcatgtttttttctccttcattttaataccccggctctttaataccaaaatatcacacatagaagaaagctttaaaaaattagatgggggtggagtggcagttgtggtgtaaatttgcttcatggttaaggccttgtatgccaagttttagtctgaattacatatttacagctgagttataaacccccgaaaaacaggatttatcatggaaatagtgacacaacttcagccagcctggtgttcttgggggttggggtaatatactgtgcagagaagtcagttcattagttagttataaacaaaggacagagatagtaaattagagtaggtatttcagcagttttctgtgtatttacgacaccaagatatgcagctgcattttattccttgagatagtatttaagtattgcagatttaaagcgcgtttttagatatggccatggtacatttttagcctgggtcattctagttcttctgtagttttattcgtggtattttcttctttctctgttgctcattagaaaaatgttaaaaatccattttcgtctgattaataataaagctgatcacatgtaacctaattttcattcagtgctgcccctgtctgtggagtcatatacaaagtgacctttgaatcgccagtggactcataaagtacaataagcaccattgtcctgtcaaaaattgaagatgttttacatcattacaaaatttaatgttccatcttttcaaatgcactacttttcaaaggccacattccaattgaagctcattaaaatcagactcaagtttcctgtggtggggatgaagagagtttcgcaggcaatgggaggaaaatgaatcactcttttaaaacagatatggttacatattagttttgaaaggtacagggatgggagagcctctgttgccggcaacagtgcggcttttgtgctgataaatccaataactgcctcctggttctttttacttcacccaccctgtatcctatttacttgcaaataaatcagctctctaaataaaattgttgttttaaagttcagaggtggaatctgaaggggtttctggagagatgctgtaaagtcagcccggcaatttcagattaaagaaaaaaatgttcctctgactcagagacctgatattatagaaacctggtcactagagagggtttcctagttcctggggaaggttggcccgcgaagcgcagtgttttaactaagagccagctcagtcacccactggggatgggccacagtagggaccctggaattctgagcccaggcataatgcctgccttggcaaagcaaacatccacaggtcttcctgttccagttctttttcggttgtcatgctggacatcttggctttttcttggctgcatctgagcacggaatctctggcctggtctctatgtaagtttttctggctggtccttgggttatacgacatgaggaatgagctcttcccatattgggcactgctcatgcaatggaattgtttaggtctagttttttgcagaatactcacgtgcatcttttgagctcttgaaatactggcctcttcaagaaacatctaggttggaaagttgttcactttgcagagcaggaaggacaacttgaggcccgacactgctcaccgtaggcttgacacccagctccacttaccaggccatagggctctcatgggccatttatcaggcattgggatttagtcaaaagagagttatccaggttctgggcaggctcatttgtaccttaggggaccatttcagagtacaagctttggcatccgctggaattgagtttgtggcccagttctactgctggaggctgtgaccttggtcaggctgcttagcttttctgggctccagattcctcatagaaataataatagtatctacctgacataactatataagattacacatgtaaagtctttaaccctgtttctaagacttagttattgatcattaactgtgagttacaggctagttgttcttttacttatagctagaaaatcactatctgtgttctatctttggagtgtaagagagtttagagaggtaaaacaagaagaagaaaatggcttgcacctgatcgaatgactaatgggttttccatgacagctatagcagttagctactgccgtgttacaaacttagtgggtaaaacaacagcaatttatgttttctcacaggtctttgggtcagctgggtgatcctgctgatcctggctaggctcaactgatcttcactggacttcctcatgattcagtaggtggctaggtcagctggaggatggctggtctaggatggctttgactggggttccttagttctgttctgtgtggtctctcatctccagcaggttagcctgggctcgttctcatgatggaggctcttccaagagagcaaatggaaacgcagaggcacttctgcccaattctgcttgcaaagttaccatcaatcatcccaccggccacagtcacatggccacacccagagtcagtgtgggaggaacctagcagagggcatggatgaaggaggcatgagccttgtaggtactaatgcaatcaatctctttctgtccccacatccccaaggggcacattgagttatatggacagtggtgtggcagggtgaatctaatactttagaagatgttttaattccttcagtctcaggacagcactctggtgagatgttccattatgtttttctggtatgctctgaggtctttcctacaaccacctgctttaccaccactgaacccattcttcccacaaggaaaacttcctttcttctttctgctggtagactctttttaagaaagctgtcttgaaagattgtatggcttcttcacaatgtcctagttccaaaggcccatggctgggattgagcagacgcagttgctgagtctgaaagcccctggcctccctctccctgtcaccccttgctggctccctccctcatcttcaaggtcctctcctgctctcttgccctcaggggatccatgttcacccagtggttctggtattggcaatgcacctgagctgccccaatggccaacattgggtccaggccacagagagccccgggctggggaccccttccctgctgtaccctactcggagttctaggtcccccttatgctttctggtttgtgctacagggaagggcccatgctgaagagacctatggtcttgcagcgagtttctcaaatgctcctcctgcccttgatggatgggaaatggtgtctttcaaggcactggcatccagagtctgaccctagtaggtgtgggtgtactcagcacaactgtggtcaggtgcccgagaagccaagattagtgaggcacacctccacatgcaaaagcaggggctctgtctgtggagtggggtacctgtgtgtttctgcgggcatgccagggagggtatgctgtagtggtgctgggagcaagactctcccagcccctcttccaaaggaggctgaggagctgctgtgtctcagccaatggatgctctggcccagacgtcatctaagccctctgggttcaggctcctatgatcctgtgtggagctgcagaaacaatagggtctcgaggaaattccagctcatcctactcttttcttcctcccctttgggcccgtttctcaccagggtctccacagtggtcagagcaactccagctcctggctgcttggaactctccctgctggtgaccccactgacatcctccatggatcagatgggggcagcagagactgtgtccacaggaagtggacagctgtgactgcaggtggccccagcattttccaagacctgtaggagcccatcggtcctcattcgatctggaagtgattttcctagaagaattgggtattagcttctggaattatgagcaggaaaagcttgctttagaaactccaaaatctgatattccatctgaatttagaaaagcagacctgatcaaattcactatgtaagtaaaactacttatttagaaaaagaaataatagtcaactaataagttcaactacttctcctgcctctaaatttatgatggaaagttagagttgctggagacagtggctcccgcctgtaatcccagcactttgagaggcaaggcgggagaatcacttgaggtcaggagtttgagaccagtctggccaacacagtgaaactctttctctactaaaaatacaaaaattagctgggcatggtggtgggcgcctgtagtcccagctactcaggtggctgaggcacaagaatcacttgaacccgggaggtcgaggttgcagtgagctgagattgtgccactgcattccagcctaggcaacagagccagggtccatctcaaaaagaaaagaaaaaaaaagttacagttgcttgtggtggttgaagatttggctttgaggactggaaacagctcttgcaggggacagagagaggccgagatcagctgatggctgtgtcctttcttgggaggactttctggatgtctgtggctggaagcaggacagtaaagaaaaggagtgggccagcgcaatggctcacccctgtaatctcagcactttgggaggccgaggtgggcggatcacgaggtcaggagttcaagaccagcctggccaacatggtgaaaccccatctctactaaaaatactaaaattagccgggcatggtggtgcacctattatcccagctactcgggaagctgaggcaggagaattgcttgaacccaggaggcagaggttgcagtaagctgagatcgtgccactgcactccagcctggtgacagagccagagcgagactcctctgtgtaaaacaaaacaaaaacaaaacaaaacaaaaaagaaggagttatgtccaagagtcaggaagacactgaatgtcgcaggattcccagtggaatcctctgagggaaaaaagagaggtgagggtccgcggtcctgcttccccagaggtgaggcagcttttggccatgttgttggtagcaaagactcactttcagctctggaagctttggctggcagctgggaaaacaatgtaatctggaagttcagggagaccgaggcagtgacacacaatgggcagacgtgcaccaaagggaggaggccgaagctctatagggtgcctactgccaagggagcctgtgggtgtgattctactgctcacacagttgaaaacaattctctacatgctgcagcttccaattctctacacagctgatgtcctggcttctcttcctagtttctcttttttttttttttttttttttttcagacagggtctaattctctcacccaggtgcaaatgaccagtggtgtgatcatagctcatagctcactgcagcctcaaactcctgggctcaagtgatcctcctgcctcagcctcctgagtacctgggactacaggtgcatgccattatgccaggctaatttttttattttttatagagacgatgtattagtctgttctcacactgctgataaagacatacccaagactaggttatttataaagaaaaagaggtttaatggactcacagttctttgtgactggggaggcctcacaatcatggctggtggaaggtgaaaggcacgtcttacatggcagcagacaagagagggaatgacagccaagtggaaagggaaacccctcatagaaccatcagatgtcgtgggacttatttgctaccatgaaaacagtgtgggggaaaccatccccatgattcaatgatctcccactgggtccctcccacaacacgtgggaattatgggagctacaattcaagatgagatttggatggggacacagccaaaccatatcagatgtggtctcactatgttactcagactggtcctgaacccctggccttagggatcctcctaactcagcctcccaaagtcctgggattacaagcatgagacacctgtctggcctctcactagctccttgattgactttaagtaagccccagacctctgtaggcctaaggttcctcatctgtgccatgaggggtagcactaggtagtccccatgggccttatcaacactgacagtcatgagacctgttggaaggagttcctggtctctgagtggtatttctaagaaaagtgtgggagtcacaggaggacagtccctgagcagaacagggccatgctgtgtgatgctgttgaaaggaccctcagcccctttggcctttctccaggctggtggggagatgccccgggtggctccaacagagatctttctgtctggctgcagtgcagggagcaactgttctgagaggcagagaggccattggcaagccagggtgactagcaggcactacactttattgggagaagggcttcctcggcagctggaatgggtgtgcttttggtgtgtgtgtatgtatgggtcctggcctgcagctccacccagatgcttaagaagtgccccacacttgaacacttccttccagaatcaaggctccggatggggctgacccctagcccctgagtgtcagtaggaacagaaagcagtgctttctgtacatggacccttgaaggggctgtagtcctcatgagggcagcaatcaatgcattcctagctactggcacagtgactagcacagagtaggtcctcaagatattgtagaatagtgaatgaagggatgaaataacagacagatggatgaatggatgaacaaatgaatgaagtaaacaactcttcaagcttgacgagctcggctattgatggagacccgagagccgtgattctggccctggtggtcagaaagggttaatagatcttgggagtattagctggacactgagaaagtggttctctcactcagggaaactgcccattggctcagggtgggatgctactgcttggggttaccaagccttttatgcatctagaatcaacagtcagccctggccaaccacaatccctgtgtgttccaagcaacccagtctcatccctgctacttttctcatctccaacgctgcatcttcctatctcccctgatgtccttccctcctgccctcctatccatcattccaggcccatgttaagcctcacatcccccagcaagtctgggctccacctcctgtatcctgctgcaagtggtgagcagcagctggaaggacctcctctcccctgctccttgtgggactcaggcagataacgcctcttagctgtcgtgttatttacactttcaaatcccccagcagcgggaggataagggatcagtggtaagaaagctgttagtgaaggtgctgtgtgtttagtctgggtgtagtggaaagtgtggctcccccgatggccctgcggttacgctttctttccctgcggtgctacagcactcctgattaaataaaagtgtgtgactctctctccacatggatatatatctatgcaaagtacagttcagagaatgtgtgaagaccctggagacacagcccaaaatgccctccagcttctctctgccaatccatgtccagccttcgggattagctctctttttctgttctttaataaagccttccagagcaacacaggtctccctcctccctgattcatcatcatttctcaagtctgcaccttgcagaactttcctctttgtttgtatgttctaatttagccttctgcagcttaggaaattgtcttttctctcagatcaaaactactttagagacagtcttggttgggtgtggtggctcacgcctgcaatccctgcactttgggaggccgaggcaggagaattgcttgaggccaggagttcaagaccagcctaggaaacatagccagaccccctctctacaaaaatacttaaaaattagctgggcatgttggtatgtgcctctagtcccagctacttgggaggctgaggtgggaggattgcttgagcccagcaggcaagtgtctcactctgttgccctggctggaattcagtggccatgattgtgccactgcactccagcctgggcaacagaacttgccactcaaaaaaaaaaagaaaaagaaaaagaagaaaagaagatacagtcttaagcattttgagaaggcccaagaaataggctaagttgattcattttcagcttttcagcaatcttgacgttggtaggaacagaaagtgctttctgtacatggacacttaaagggactgtaatcctcatgagggcagcaaccaatgtatttctaggtcctggcacagtgcctggcacagagtagattctcaaaatattgtagaatactgaatgaagggatgaatagtagatggatggatgaatggatggatgaacagatgaacaaatgaatgaagtaaacaactcttcaagcttgacaagctcggctattgatggagaccctagagccatgactgtggccctggtggtcagaaagggttaatagatcttgggagtattagctgggcactgagaaagtggttctctcatccagggaagctgcccattggctcagggtgggatgccactgcttggggttaccaagccttttatgcatctagaatcaacagccagccccagccaaccataagccttctgtctcaagcagcccagtctcatccctgctatctttctcatctccaactctgcatcttcccatctcccctgatgaccttccctcctgccctcctacccgtcatttcagggctgtgtcaagcctcacgtcccccaacaagcctttcctgttgacactaggtaatacaagtcttctcccacttgatgtccaaggaactttcattgtctgtaccacataacttgatgtctgaaatatcagtatttgtcacactgcagtggaaaggtgtttgagctaatattttcttttatcccagaaacatacactgagctcatacgtatcagtcaatcagacaagatcctctatatacttcctctaatcccccaatcacccctgccctcctggagcttacacttagtctgtttggatcccacctctgccacttaatagctatgtatatttgggcaagttacaagctatttctaagactgagttttatcatccgtaacatctagctgacaacaacttctctgaaacaggttgcccaagtctcgttaatgtgaataccctctgcttatcctggttccgtcgctggatggaagaaattttgatggacaactaggttgcttcattgttctatagaggcaaaaaggggagtggaaatcccataaatgggtcccagcatgcgctggttagtgagaatgtgcggccaccatgttctattgcatgttagtcacgtaagtcctaaggtcaaccttctggagaggaagacaaatgaattcagaatcaggtggacaaatgcatgtaactgaaggagtaactgacataagagcaccttttgaaaatcaactcaaaaagccatggagtttccttccttccttctttttctgccttcctttccccttctggtacttgatataatttccactattgactatcatttttaaaaaggctctcctggccagccaacttctagaggatggtcataagctggtaagcaatgaagcaactgtaccttctggaaattaattacaggttcaacacagcctgctttttgcccacctgtaaaatagtgtgtggatggagagtaccatgagtattgcatagtatttaatatgcagtcttgtagtccaagaaacacttgtcaacattatgtaataatctatgatcaaaaactaaaacttgtcaacttcaagaatcagttgcattctaactctacaactgaaactcatttaaaagtatatgaaaatcatgaggaagagattcaattaaaattaattgaaagtatggaaaaatgatttgcagtgatataaatcagtacttattgcttactttagcttattctataagggactctctaagaacaactaaaaagatttctaaatgtgtaaaggacaaataacatgactctgtccacacatatcttgaagatttaagaggagctatgatacctttttccttctagatcctcaaccagcctttcccatcattgctacttttctggactgagagacatagcagaaatccaattgcaaagatttttctttttatttttttaacttttgagtgtgcatgcaatttcactgatagcaggatctcagcagagaaattaacttcaataatctatggattacaagacatatcaaaccttcaaagcagtccaatgttagatctattctcagaagggtttaaatggctttaatagttaacaacaaatgatagaatgcattttcccaactaaatcaagatcagttggtattactctcccattctccgagccacttaattatggcaagcatggtctccatcacccatggtgaagcccttgaagtgctcatcccccgggggtgcctggttttgcttcctggcctagcagacatggcaggatccaggcaatactgaagggcctggttagactgtcctgggcagcctgctccagcatgccatcactcatacccttcattgtcagtcgaactattgatcttcagcctcctaaactggagacttcattccctgaaaggattaacaaggacatgttttaggtggcagacttctggggaaaagctccatccctggaagactggccatgggagtggtgcttgcagagctaaacgagtcgaggcatgctttatgagagacgagggagaagcccggagcctgcatgcatgcaaaccctttctgacctgcttattccccattaaatttgcagcctgtagcagtgctcagtctgaggtccagaaggttaagttgaagttgcttctgtaattggtgcattaaaaaggcacttctgtttactaacgtcttgcaatcagttggtgcatgcatggccttgccacttgtggcactcttcttcctcttgtgggagtccctctagatctcataggccccagctgcaaagtgcactcagtcttcatcccagagcaacacgtggcttcccagtgagctccctcaggcggcagctgtgctttgaatcacagatgcacctgctgggctggaggtcacattgttaggcgctgatctttactggctcatatggtggtctggggtcattttggcagacagcaccctagcagaaaaagcagagtgttctgtcacctaactgttgagcatcaccacggcagtggcatgccaggtacagccctgagcccagagtctctttagatacatatgtggtcatgactgcattagtaggaattgagggtcctgatcaccatggtcagtgagggggacaaggtcctacctgtttggccccagttgacccctttgaggaggagattggcagactaaggccagccaatggggagaagcaagaggatgggaggtcctgaagcacatgaggtggcagtttccctgtgtgaggggaccactcacacagggagttgcacacaaacatcatgggaaatgcattcctgtttccattttttttctaatttttctgatccaaaccaagaagaaagtatcagtttggtgctgctctgcctttaacacctctccaacatttgctcatcacagtttttaacccagagagagaaggtcttaggcccagaaccttttcaggcaattgcttctagctggtgtttaataacactctcatgttttcattgttttatttgtgtgaatattttctaattatgttgagtactcctgggcttccgtttatggttcagttatagagcttccttttggaataaattttcttaaaaaataaaaaagaattagttatttttttaagtaaggaaataatagtacaggtgacatgcgaatatggcaagcgtcatagaagcattctaaagacaagcatgttttggaaacattgggatgtgaggtgtggccaaaagaatagagctattcagacttggtgaaagggagctggggtgtttctgaatgtgctggagaatccccaagagacctgagaagagggatttagagaaagttagaggacattagattttggttctcaataggaaggaacctcctattaattatcaccttccaaccctagggccatgcttgggagggctctttgcatcggttaccaccatctgtatttgcatctgctctttgtgttggttgcaaccatctgcatggtttccatggaagaaaggctctgcattgcccgaggtccctctgattccaggattctgtgccctagaccctctgttggctcttacaggccatgaaaggcagcgatgttgactcttcctgctggagatagcaacaatagagccacactttggtttaagaggttgcttgaacaatgagaagagggttttcttttcttttgattattttcttttgaagttgaggagtccacccacaaccatgtttttcttgaactgttgttgctgttgaaaccgattacctccttctactggcagccctcaggttatggatgtttgagaatggagtgcaaactgtttatttgggggtgatctcaggaagcacaggtaggggataaagaaatgaagcaaggacaaaaagcaaagcaaaaagaagggtgtgttaccaagctggtcaccatagtgagcagcactgggggacaaggtagagctgggcttagagtccacccagtggagcagcaaggaagctggggtgttcattcttcaactctgtatccatcattgatggagggttgcttgtagtggaattaaccctctggcacttccagcctgccctgtgtgcagcctgagtgtattttcatcactagaaaaatgtctgcagacagaaattcccaggggttccctctatgcagactttggtgtctaggggtgccatgtggagggggatatgagcatgacacttctagcatctatccccagaggatcatctttaaagatagtaaaatgttgattatatttagaaccagcccactgggctccatccagatgatcctcttttgttctggtgactcacaaagtgtgatggctggagagagctgggcctgtgcctccttctctccagcaggcctgggcggtgttgatgttggccatgtcaacccatggaggttcttcatgggctctgatctggtgagtgtgagccttgaccccctcagtggagggatacttggtgggcgtccttctggcatccatcaatgttggacatggaattgaagaataaacacccaagtgctgttgtcctcacattctggctgacttgtggtgaggggtagcttggcagctgccttatggtcaagcttgttcctcctggggcctctcttcctagggcacttgggccctggtgtcttgggcaaaggagagtgggtgacatgcacattttctgtggcttccaatgcctttcagcaaggctttcttggccttcaaagcctttgtctttcctttgtttggggaaagcaagagcttctttctttgtgtttcaccctgtctctgtaaaaaggtcctatggattttaacctcttttttctctgtgtgtgctatgagcttgcatcacagcctgcagcccacttgcagagctggaagtaagcacccattgtttcagttccaggaggagtggagatgtggggcagaagactggagtccaggtctcactgtactgtgacctcacagagcccctttcagtctctggggccagttcctccagctgcagagtgagaggcttggacttgattgcttcagaggatgcttccagttctggtgtttgttttctgtggttcccatttataaaacaaagcctcttagatgtccagctgttgaagggaaggccagtccttgggaaggatggttgctaaccttcccaggtggcaagaaactggcaaggggcaaagggcacctgcagaaaggagaagaccaaggacttctggtgtggcctgaatcacactggcctgtgcatggcccagatgtgtatggttgggagagcccagcacagctggcctgcttcccagactgttggatcaatgtcaacagacaactgataattcaaagggatgatgaagacaaatgccacccactcatttggtggaagagaattcagaccagaagtagatactagcagaggaaaagtggccatttttcttatatagcaatggttatgtttgagatgtcagggcagggatccgagggtgtccttactgttcacacttgtgcaggactgccactgccttctctcccaggctgtttgtattagtctgttctcatgctgctaataaagacatacccaagactgggtaatttataaaggcaagaggtttaatggactcacagttctacatggctggggaggcctcacaatcatggcagaaggcaaaggagaagcaaaggcatgtcttccatggcggcaggtgagagagcttgtgcaggggaactcctgttcataaaatcatcagatcttgtgagatttattcactaccatgagaacagtatgggggaaattgcccccacgattcaattatctccacctggccctgctcttgacatgaggggattattacaattcaaggtgagatttgggtggggacacagccaaatcctatcactgttccttggccaccccattccactgtttcacagtgtcctttctctctgagtcacagccagctttgatgggttgctggagcagtttgaggaaagaaaatagtttgtgttggactttcaattgccaactataattttattgaaggacaagagaaacacatcccttggagaggggcaccacccttcagaattccttttcaactctacgaaggtggccttggaaaactttctcagtgcagtttggaaagcttagtactcacatactgactaggtatggatatgtttctcctgcactttggaaatcttttgaatatttataaatttaagtatttattttcatattaaaattaaaggtctattgtcttgcaactaacctgccttgttctgccactccaaaacaaaaccttctctagtgtgataacctttatttatagatggcaacaagcatatttagcaatattattattcatgacccttgcactaaatatcataatcagaatacagatgtgcagagtaatttccatgcacaagtcactatgcatcaaattcttgcaaagcaaaaatagcatccattttgggataaattatccattggtgttgtataaaggtatcgaggcagcacaaagggtttcaagtagtaggatatggagagactgtttaaattaaggggtacccaacaccccaggaatgcagtgggattttttttccatttttccccttccggcaacttatttgatcaccttcttttgttagacccatttttaggatgtggaaagaaaatgggtcaggcatgtgggtgtctggatacaaagtgtggctggatgaaccaaggcctcctttgctctaaaccccatctctgaatattttctttatttttgtcaagctaaagatgcagattatcagataagcagcacacccgggctcagctcactaattgactgaacaagacgtggtcacagtttatacaccattccataatggattttcatgtttgtgaatcctaactggctgtggaaatgaaaagcaaatgtctcataatcacaaatatcttctgggtttttttttttttctaagcccaaagattaaatcaactttaccccccatttgccagcaagttcacggttatagaaggaagataaatgatcgggtgatggacatatccgctgtgctactgtttagcaaattcttgtaagtgattgctagatatagcgcatttctcacttaggtgttacatgaataattggtatattaaagaaagtgtgaaataaacaggtataacgcttgaaatgtgtttattattttctgaggtttttcacattcataccatttagaagccatcatcaagtccagcatcttctcccatatacctggagccgaacccttcattagacctgttgtaaaaagatcctttcgtgcaaacgctgtcaggtatttataatgaaagtgtggcagatcagagaggagaggctgtgtgaaaaccatcaaactggtcagaaatacccacaactggaggcctacctcgctccggcctctttctcgctgctctcttccatctcgcagctcctcctggttttctgcttgtcagtatcagatgcaatttcaggccaaccccagcttccttgcgctgtgaccaaaaccctttgtgggcagtgggtctctgagcagtgagggaggaacctcatgaggctgacttcagggtcttcactaagaggccatccactgtgctggggataaattgcccgatttttcagagaggaagagatttggggcaggttctccaaaccttctggctagctcttgtgaattcagcagcagacaggccacacccagccagcagccctcaggcctggctcttatgaatgacttctactttctgaaatggagcatttcctaaaaaggtaggcaggcccagcacacccggctgtgactctttggcaaagcaaaactcttctagtctttggcgaggcagccttggctctgaccccacctggcaagagtccgcgggcaacagagttttgctgtctttgtttctccctctcctccctgcccctcacccacccccttggaaatttaggactctaagaacagagaaaagctatcaggacaagggctggtcattcacccaactgacagagacctccaaggtatcaaggctatctccttggccttgagagctggggtctgccagcctggctggtcttcaggcactttggagaggatgagatggctagattgctagatggagtggacttttcaaagtagagccttgtagacactgagaagaagaggaaaaaagagtctagacttaaagatctcattgattgtccttggagacaagccagcctcagagtctgtcccatgtccccttttcttagtctcatcctctctatgccacgtggaatgtcttccatggggctaccaagagctgcactgcatatataatatcaaacaccaaagttcaatgagtgatccagggacctttctctgcattccccagaagcacaatcaataggcgttcaatcctggagtgcgcagagtcacttgccctggacctcatcttacgtatagctgtcaccatgcccaggaacaggaaatgcctatttgacccagcatctgtccatacacggccagcagccaggttctccttgtgcacctctgtgtactttctgagggcatgtgcagaaaggcaggggccaggccacagggcctgtcccaggctggtttccagggctgctttctaggctggggaccctgggagtcaggccacaggtcctcccctcttctttccctcctcagtctccccctgctccccgtgtgaaagtggtgacctgcctgccgcctttctccctacctccctccagcactagctgctgccttttttgcataactggtaacaaattgcttgactcaccacatgacattgactatgatggattaaatagctgccttgaccagatcattaggcgctcgtctgcaggacacccccgtggagcctgctggagagaggcagggggcacaccagggcaccccctgggtgaggggtcctgctcccctccctggctgcagctagccggcctgtgctgcctcctccctccccactcttctcctgtttcccctgcgagaagccgctgcttggatcctgcattccatttagtgacagccgaggccaacgtctgagccacgctggcacagaggagcagtgcaggaggaccgggtgtggatgtaaggtgtgggattcgaggcaccccctctcctggaaacctctgtcccccagctgccccgaaggccaacccaggggagccatgcctgtgtgctcagtgctgccctggcagcactgagttcttccaggaggaggctcttctgcatcctgcttgggcaggagggacccaaggtgcaggtggctgcagtgggcaccgcacagaggtaggtctcaaagtgtggccaaggaagccagagccaggagaggcacaatgaagttgggccagccaggccagagtagttcagctagtctgaattccaggcctggccctctgctttcactgtgattggagaccttcgtttccccatgtggagctcaggggttggccattgccttattaccctccctccatcacttgggagctggcaacagtggtgaaaatcacggttcttttttttaattattttttaagagatagagtctctctctcttgcccagactggagtacagtgttgacatcatagttcactgcagccttgatctcctcagttcaagctgtcttctggcctcagcctcccgagtagctggcattacaggcttatgaccccatgcctggctattttttaatttttttgtagatatggggtctctctatgttgcccaggctggtctcaaactcctggccttaagcaatcctcccaccttggcctcccaaagcactgggattacagtggtgagccaccatgcctggccagaactcaatgttcttgaactgtggttatttgtacctcgaactgctctcccacccaaaccaccacctgctttctccaagcagtttttgtggatagaatcttctctctggctctttcaagaccccaactctgtaggggaccattgacttgcatagttctagttgggtgggcccagggcctttccctgacttcctggagtgtggagacctgtctgcctcaagagttgaagtctctgaaacaagcctttctagtgtcaggacataagaggcagggaaaggggaaagcaagcatgagagtcccaggggaggaagagggacaactcctgggaaaggagagggggtgcagtggggagcagggtgaagacagggcagccccacttctataggacccagagaagcccccatggacccctcactttaaggctccaagagcatccaaaagggtttgttctttgctttctgtgaccatgggctaattcccaccagggccaaagcaaagatcgtctgcgggacatactgttctttcttcttatagacctaatgtggcagagctattttgggcaacaattaaataaaagccaatttgactaaaaagcaaaatatattccactgaatgacagcaaaagggcagagcttggaaagggaaaggagaaaaaaaaatacagagagagagggagaggggaaaaaaaaagaaaatgcaaggcattcatttttcctttgtattttttaataaaagaacgtctctggctgcttaaagtgacacattaaaagatgtatgtatcgtggcttttaaaaacacaattagataacaccttgtcaaatacttatattctttgttgacagccttgagcacagtgacaatcgcggcacagccattggggcaggtgtctcccctgacacgccagcagcggagtcagccattttacagaaatgttactgtttaccactttaatcatcaatccacatctagtcacaacaataagtcagaaggagcagtaaattatacttgttcagccctgatgagtttgaactgttttgctgaaattaactgaagtaattatctatttttctaaagctgcaaaaagggaaaaaaaaaagtagtaatgttccatggggataaagaatctttgcaaagtagtcggccgtgcaatatttaaggaaactttttttgcgagtgtgtgtgtgtgtgggaggggggttctgatgaccacataggttagatgaggctgtgagatgaggcagatttcatctgctgcaatctctttttttagctaaaaaaaaaaaaagtccttcctgcgaaaggaggctctcttattactggactagcttctctctccacctgatctgaccttttcggggagcccatcgctttctggggctgttttcttttgcaatgctaatagcgaattcccaggttctgaggctttctggcttcctgtgatgttaagtaaaagaggagggaacctttcaattgttacttaatcccttaaatgtgctaggctgaccagtctaggcatttagtcttgaaagatctctgtccctgggaaagatccctgcaccagtgcgcaagcatgcatgcccagttctcaggttcccccaacttctgtgggatggtccccctaggaccctgactgagtcgctgctatttaggtctagtctaaatatatatatataggtctactctcctcaagtttacaacaggacacacagggcatttgtctacttgtgcaatagaatgccacgtgcttggcaaacagacagatggcctgacccgggccatcatgggcatccccctctagaaaacacggccaatagcacccacctggcagggttagcccgagaagtgaatgggcttctatgggctgatgggagtgcaggacatcacagaagtcagcctataggtgatgctctgtaaatctcagtctactgtgcctttggctacacacgaaggcatagtagggttataattaagagcacaatctgaaacctggctcttctgctttgtagctgtgtgatctccagcaatttgcttgctgtcttggtttctaaattagggataatagttactcatgagtgcaaagcaacctctatgtaaaatacacagtaagcgctcagtaatatagctactgtcagtattattgtatgtatatggttgctattgtggtatgcatagttttgttgttgttttatgcatattgtatgcatatttttgttgttgtatgcatatagttgttactattgttgcatgcatttgttattattgtcgtatgcatgttgttattgatatgtgtattgttgttgtgtatacattattttgacattgttgttgtatgcatatagttattgttgtatgcatatagttattgttgtatgcatgttattgttgcatgcatgttgttattattgctatgtgtgttgttgttgtatatacattgttgttgatggtgttgttgtatgcacatgtacacagtacttagagcaacagacacagagtaggcatgcatcgtgaatccagctgctgaaatatcccgccagcttcttgacttgaagaataaaggagggccctgagccgtgtcctcctggtcttgcttctggttgtcctatcttccagcaactcagcaatagagcaggagaaacttcaaagcaccttccagctctatcatctgtgagagtagcctccccaggcaacccaacttagctacagaagctgcagttttgctgtaacatgcccttgtcttccctaacttacctttacagaaggaaggcttggtaccaagtctgcatctagggagagtctctgcagagacctgggtgcccacgaaatcccctccactctgagccacataaataattttgaaagcgcctctataaagccacaccaaatatatatcattgtctagattattcaaaaacctagggactccactttcttcttaattttctgtgtaattaagacaaaattaaagcaaaacaaatggcgaggtgtgggggagggagaatgaagcataattatccactccatctatctagacaactcctatccacagaaaaattgttcactctaccatgttttgatctggataaacatggtgattttaccccatggaacattattttctatgattcattgtgaaaaaccaacaggctctaatctgaagttctaactaaaaaaatactatagtttatatttaaatttggggatagcagtggtttgtttccttagtttactagtcaatttcttgggaaaaatttcttctctcttttcttttcttccttcccttcttcctcactattttttcctccttcccttgtgtgcctgcctctctcactccttcttccctttctccctccctccctccctttcttccttccttcctccttccctccttccctccctcccttccttcctcccttcctccttccctcttccttcctccctccctccctcccttccttccctctttccccatctctcctccctccctccctgtttcctctttccctcctctctctctcctttcctccctccctccctctctcccttcctcttctctctctcctccctccctcacccttccctctttccctcctctctgtctcgtttcctctctcccttcctccctcccttcttcctccctccccctccctccacccctcccccatctcctttcctccctttcccccatccttgtctctctcctttcctacctcccttcatttctttttccttcctcctttccttctttccttcctccctccctgatccctccttccctcccttcctcctcccatcttttgtccctcctttcctcccttccttcttcctcttttcctcccccgtccctcccttccccctccctccttccttccctccctccctccctccttccttccttccctccttccttccttccctccttcctttctaccttccttccctcccccagcccttgtctattcattcgcatatccactcagcaaaccttctccattgagcctggcctgtgtgaccttgaaatgggctgacccagctcagacttgtgtcactggcctccctttacaagacaaggcagagactgcagatacttttctaaccgtataaaaagtgagagttacaagtgcagcaatgaatgcggaaaacaatggcagacagtcgaggacctgatgaggttctgtacatttcacaaagcacatttgtctaggttttccctggcaaccttgaggcatcttgccctattcatggaccgtcttgtggcctcacaggattttcatcttttgattttctgaaaagctgtagagtcccctccaaaattaagtgacaaatctccaatctgagtttgattcttggctgtagattgggtgtgtcgtgtttatgatacaacaatttccacggagtgtcactgggggaaaaagtggtgattctgggtctatattctactctcaaatgctcctagctgtttttttttttttgttgttgttgttgttttttgtttttgtttttgtttttacttttttattcttggagacagagtttctctcgtctgttgcccaggctggactgcattggcttgatttcagctcattgcaatctccaccttccaagtgtaagcgatccttctgccttagcctccctagtagctgagattacaggcatgccccaccatgcttggctattttttgtatttttagtagagacggggtttcaccatgttggccaggctggtcttggaacttctgacctcaagcaatccatgcacctggggctcccaaagtgctgagattacaggcgtgagccaccgcacctggccggctgtttattaatcttaatttttaaaagctacaaccaaaacatgatcttaggtgctactcaaggccagagctaaggagacagggcccccacaggctgaccgtttcatgaatgtatctatatggttccagggttccaggcacttcctcacatccacgtcctagtgtgtcctccctcatgtattgaacacacacctgccatgcatttgagggaggaagagcatggggcatattgtaggtcagcaaactggcgccccggaggaggacatagcctggccagcacccctggtgagctgaggcagtgggtcccttccaacagtggtgcaaacgttcaggcgtgtgtgccccattctgtgatgtgtatgcaagtagctggtaacagactggagcatagcatcagccctttgcagagacctcctcagaaagctcaggcatcaggggctttggctttaagcatttctgccaagcatcgagtgtgggcctcttgagaagagttcttttgttccgttgattcctggaaaagtgaacgcttgttttattcgttgtttttgttgttaattgagcaactactttctgatttttactgatggagttggttagagaaagactttgggtaaaaggtctaaactctcacttccaggccagattgaggttagtgctaagccagaagtgggctcctccccatattccctgtgttcccacagtgaggacgctgaaatctaaattgtgaactctgggagccggaagataccagagagttcacttaaaaggaaacttttatttgacatatggggaaactgaggactagacagctaaagtgatttacctatgaccatattctccattatcccagcagatttttccccacatttctacaagtcccaggcagcaatctgggtgctgggactccagcagtgaacatacaaaaccacggctctctgggagcctgcatcggggtcacattctagaaagtccgtgttcgtgagtcacgtgggcagcagattcatggcaggattaggaccctcattcttagcctgtgggacacagcccctgatgggggagcctgtctgaggtctctgggctacgctaggagggcccacatatggcttcagggactgcaggaaacccctaaattgcatgtaacacttgaatatgggcatctctgccatcagaaggaacctatagatgccatcagctcctcagatgggcccctgactcccacaggtgcttagaaacacttcctggggcccatctctgagaaacacaaagcaaggtgggcagctcgttctcagacctagcagcaagaggcataattatggggaaccagccgagaagcctgctgtcaagacagtttcctgggcaagggtctgggacgggtatgtcctgctgaaggcaacgtggctctcccaagccctgcagtttgcttgtgtgatgctgaagggtgtggtggcaccgtggctaggatggggtattagcaggaccctgagacactcagaaaccccattctagaacttgctagccagggtgagaactgtgtttcatgcctttgccatgtggctcaagggcattgaaaacgtcctctccccacagtcattgggaagcaaggtccactcattcccaacttgcctccaggcaggagattcaagctgtgcacactgcaaacttctgctgaaaagcttcagtccacccattagcgttatctgcagtggtatcaaaaaacgaattagggtgcacaatgaagtattgggttctcactttgatgcaatgatgaggaataggaaggcaggtggatattcacatctgctcatgtgatggaacatctgctcattggctgcctggattcacatccaggtgagtatccacatcctcattggatgtctggattccttctttcttctttcaacaaggctttatggagtatctgctctacgccagcctctggtgaagctggtggagattatatgggaaaaaaggcagatgaagttgctacttttgtgcagctcccattcttgtgggctctgtgctgcgtggatacaaccccaatacatttatttttattttgagctacatttggaggccttgacaaacagcttcccaatggatacccaaaagtcataactggatgggtaatattgttattctctccaagaggttagcctgcttgtgtaaagaagtcagtgatgccgaaagctcaggtcccatggcctggtcctgctaagaccacgtgtgcatattttcatcttgctggaattttggggccagatccaggctaccgattccgagaagttccagggttcaaggagcaacagatgcagggtttgtgctagctcagtctcagattgggaggatcccaggtgccagtatcctgtcaattctgtgcaaaggcggagaggtgttttctgcatggaatctggctgctgtgacctgggattcagggagcaagcggctggctgggtactcttgagagaccttaatcctgcctttgaaaagctgcttaaaaataatactactaaataaatctttacagtggatggaacaagctagacttcggtacccatcccccagacaaacaaggagagattagacgccagagtgagagaaggtattagttgcccatcagtggcatcagtctgtgaggtgtgtccaggtgggtcctcctcctccagcccgtgtgacgttctaccttgtgctttgcagcacaggaaggcagaatcataatcacacaggcatctggggctaatacatatattcaacgtctgccaagtactctagactggaggcctcaggagtataagaactgtatctgctttggtcatccccgaatcccccaggtctggcacagtgcctgaaacagagtagaggccttaagagacacatggtgaggaaaacaaaggaaagaaagaatggatggatggatggatggatggacaaatagcagtattttgtgattataaggattatcaaaacttctggtacctggcttatattttccaagccatagatccgatggagatagcacagatgtctcacaacttttcaaatctctttaaacgaacaaatagaagccacttgtttacctgtaaaaaatagtgtggagtctgtttctgtttcaaactaggtgaagggaatcttggtattcattttattgctactattatcttattgaacactatggatattattgtgcatatgattaaacatataatttaaaaattaattttagaaaggaaaacaaggagggggcaccaatcttgcatactgtgatgggaataaaaatgagtaagttatttgcaaagggtgatttcataaaacaatgtggtacacagtaaagtctctttaaaaaaagcacatgtgatttgaagcatcaactttgtttctagaaattaatactaagcaaataattaaatatgtgcacaggccaggcacggtggctcatgcctgtaatcccagcactttgggaggcctaggggggtggatcacctgagatcaggagttcgagaccagcctggccaacatggtgaaacccagtctctactaaaaatacaaaaattagccaggcgtggtggcacacatttataatcccagctactctgaagactgaggcaggagaatcgcttgaacctgggaggccgaggctgcagtgagccgagattgcaccattgcactccagcctgggaggcagagcaagactccatcttaatttaaaaaaaaagtgtgcacagggtaaaccacaaggatgctcatcacagtgtggtatgcaatagtagaagactggaaacagcctggacagggatagtgatgtactgaatgactggtaagatgctaaaacaataaaatacatttctgtgaatacacatggatggctgccagtaatatgttattaagcttttttttaagttacagaaaatataaatatagtaaaatttatttttgtaaaaatattcacatttataagatttatttattcatggaaacattttgaagtctatattccaagtctatctatatatttgcatattattttatacttttataatgagtgtttattatgtttataatatgttttcattttggaaaatataaaataaaatcacagtgtagccttaacaagaaagctgttgagctttatgtcaggagtttttgtggagtgctattagcttcacaggataactggtttttttctttatgatcagaggcactaactggtcaccacaaaggcctttgatgagttagcatgagaaaagtaatcagttattacctaatagatgctttttcttggtcaataaaacttgtcaacaaattgagtttgtgggtcttgggaaatgatttaaaagcagccagccactaaagtaattaagccaacactcttatttttcacatgaagaacggacattcagagagggcgagtgactggcctgaggttgcacagcaagctcggggcagagtcaggaagccctggccctgaaatcttcgtgcatgaatgactctgcatgatggggcttctggagaagggacagcaggaaggcagccagagtccttccagcgacagcaggttttgcaggcacaagtccacgtagcttgcactacaaagcagatcacactgctggaaccttgtattcattaccttatttaatcctcacagtctctctgttgggtaaggggtctcattatccccattttacagatgggaaaactcagtctccgctggaggaactcattctacatgttcctgccattgatgctgtaggaaggtaatagtggatggtgcgaaatgctttttttgtttgttttcttttgttttaaatttccatagttttggggggtgcagatggtttttggttacagggataagttctttagtggtgatttctgagattctagtgcacccatcacccaagcagagtaccccatacccaatgtgtagtcttttacccctgaccccctccaaacctcccccaccgccaagtccccaacattcattatatcactcttatgcctttgcatcctcattacttagctcccacttctaactgagaacatacagtatttggttttccattcctgagtgacttcacttgaaatgatggcctctagctccatccaaattgctgcaaaacacattgtttcattccttttcatagcagagtagtattccatggcacatatatactgtattttcgttatccactcattggttgatgggcacttaggttggttccatatctttgcaactttgaattgtgcttcaataagcccacatgtgtgtgggtgtctttcatataatgactttttttcctctgggtagatacccaggagtgggattcctggatcgaatggtggatctccttttagttctttaaggaagctgcaggatgttttttgacatcactgtatcttgcagacaggcagggactatcaccagctcacagtccatgtacttccatcacacagattcccatcttccttctatgaccctggcttcagataggagccgtgctgcttcaggttttgagggagtcaaattgctacttaggacagaaagactttggccatttgaaaagcctggagttagaggtgggaggccaagaatccaggtagccagtcttctgtgagatactgagctgaggccatgtccaggtcaccagcaaattgaaagagcagatgttcctggaaaactgcttgagcctaggagttcaaggctgcactgagccatgattgtgccactgcactccaggctgggtgacaaagtgagacctcatctctaaaaataaaataaaataaataaaataaaataaaataaaataataaaataaaataaaataaaatataaaataaaataataaaataaaataaaataaaataaataaaataaaataaaataaaataaaataaaataaaataaataaaataaaataaaataaaataaaaataaaagtgcctgcaaggacacacacacctcttaaggctttgaaagggacctcctcctatttttagatgctacatgctttcagctgtcacgggcaacccataacctctggtcttcatggtgggatgcagtgagttgggggtttcccagatggagtgcagatttagttctgagggcgtgggttggtgctgagccacctgaagtaagcagggcatgtttattccaccgttgggaggccacttcaccagtctttagtcaagaccctgaaggtgtttggttgtcccctttcttaggtgaccacagttccatcatgaattggtaggtaacactttgtgaaggaaacagagaagaatggtcctgagtgtgaattgagttgactcccaggcacaaacgggagggtggctagagtctgggctctgcagacccatcctgtggatttcaatccagcaggggccctgtccagctgtgatcctgagaacgttgcagctcagcttcctcctgtacgtaaagagggctacatcatgacctccatcaaagaagtggctgcataggaagagggttcttgtcaatcctcgaatcatggaacactgggggcagctattggtggaggccccagcaggagaaaggtggagtggagaagggaggggaaagggaggatgtcagaatgtgtgtgaaggctggctctcacgaccccaggccatgccattgtaccaacctggctatctctgcacaatgcagacagcccctggctaaactgtgttctttatctgcaaactgagcagcttggatcaaatgatcccctcacctccctaaacctcttcgacgtagatttttgtcaaacttatttacaaaagatcctacacaataccatcatactttctacaccttgtttatggctgagtgtggctgtaacttgctttcaaatgtttttttaaaaattcatgtgaaacttttttttgttttagagttttttactggtgtaaaatgaggctttctattgacattttgtgatggggatatttttattattattctcattgttaattttaattacgctcttctttgttcatcaatagctttctttcatgtcccctccttaattcattatattttaaaaagtagccgggcacagtgtctcatgcctataattccagcactttgggaggctcaggtgggcagatcacctgaggtcaggagtttgaaaccaacctggccaacatggtgaaaccctgtctctactaaaaatacagaaaaattagctggacgtggtggtgcacacctgtaatcacagctactcgggaggctgaggcaggagaatcacttgaacctgggaggcagaggctgcagtgagctgagatcatgccactgcactccagcctgggtgacatgtctcaaaaaaaaaaaaaaaagtaacatactttcagaaaaaagtccctatgcatatgtgtgtaacatattagaaatatatatgtatatgcattactttatagtcctattatttttgaaaatgtgatcatataatgatcatacaataggtattttctgcactttgctttttttcacttaaacagaatgaggcagatgtagaagtattgactttagtctccagttatattgttaccaggtgcatagtattctattagaccatgtacaataaattatttaacctacctggtattgatgcttacccatacaggatatgatattgttgtgagattttgttatttcatgcaaaacttcaccaaatatcttttgcgtatttgtgcaattgtatttatacaataaattcattgaagagaaattgcaattgattttttgaatggatttgtttggaacaagatttacaaaattctaaatggtatgacaagcacagaagtaaactttttcaagtatcagaccagaatgaatcttgaaaccttcaggagatcactgtgggcagaagaaatggatttctactctgcatcgtggtcctttgtccctattcacctcatcacaggaagtatttacctagggtcatttttttttgcaggtaaacacttcttgggataataagcaggtgaatgtttttcatgggcatctgcagatgtgagacccgggagacttgtgtagggtgatatgatgcataccaaaatgagagctttctggacacgaatccaccagaactttagcctggactggccagggctaatcctacctgaaggttttatgaggtgccagctctttacccagctgtaggctacctgattccagtctgggacctagaatgagccatattggttgatggctatagaagacactggtgtagtgcacagtcaggctgggtgaggttcctggctctaaggaactgggccccagcagcttggagatctagagtctcgatcacatagttcttgttgtgtgtttccaaggggcccagcactgatcatcagggtgaacttatgttgtggaaatctcctgtgattcttgctaaggaagatataggactttcactctccctctgaacattgtgaccagcttccttggtgcctaaggagtgggcatgggaatcagaatgttgccttggagcttggaccagattaaaactctagtgcagtcccttgggagatgtgttgactctcatctcgaagccaggagtcagccacggaagtggagaagtccaggtgacaaaagggcccatacgtgtctctctcatcttggcttgttcactacaacatggtaactgcttgctgaattcgatggataggaacagctagcaaagtgattgcttctagactatcattgcattttctacttttctattcaattgctctccatgtacatagtgcaatcccttgccccatctcagcttctagagagaattaagaatgctcacaaatattaaaagaagacttgtttgaaccccaggaggaagattacattttggaatctgagccttctatcagtcaatagaaaaatggaaacagggtcaaatatatgattcagggaaacccacaaaatagctcttgtctagaatcacctctggacactttctatacaatttctaattacttttttgaggttagttataaggaacttcaaatgtatttttgtagagctaaattctacccctgactctgcttctcaagcactgaatgactggccttaacatctttgaagttctgtttttgcagctggcaaatgaaataatttttgccatggctctgacatagctattgtgagggcccaagaagatgtggtaaagaaaagtgttttcttagctgtaaagttttgaaataattaagaggttaatggcagtggcctgtaatgaagcttgtatagttaggttggccatcagtgttgttcaaatgtacactatcaaacaactccgtgcttcaagacatttgtttattcatttattcatccatccatccatccacccatccatccacccatccacctatccatccacccatctacccatccatccatccatccatccatccatccatccatttacctacccatccacccatgtatccatccatccacccatccgtccatccatccacccatttatccatccatccatccacccatttatccatccatccatccatccatccatccatccatccatccatccatgcatccatccatccatccacttatccatccattcattcaaccatccacccacccatctatccattcatccatccatccatccatgcattcagccatccatccactcatccatccatgtcacagatatttattgagaatctactacatgctaggcactgtggaaagacaaaagcacatccccagccctcagaaacttctttctagtggaagtaacaagcaaggatagtggatgttacaatgccttacaacacattttctcattttttaatgataaaaatgtttctagtttccttagatctaaaacatggacctaaatgataaatgccttttgtgtggtgttgggacaggatagggtgtgacggcaaccatatttccatctggcagggcagttccaagaggctgggagagctgatacttcttcacatggcaggctgggctggcacatttggggattacttcagatcccccttggtggccagtccttgtgggggtctccccctctgggtgggggaggctaagtctgtggatggctgctccatcagcaggtgctattttaggactccccattgggctgatcctggggtgaggtattcccattcaatttctgtttgaatcagaaacagagtggaagcttagccgtcaaaagaggaagaaatggatcttcatgtcatctcaaacttttaagacaaactcagtttctaggcttacattcctagaacataccttctccactggccacccattttgttttcttttaaatgtttccctctgaaccaaggacagccctgtcacccgactgtcattgctgcagagtgtgtgtgtggaggcgggtgggggggatgaggactcagacatgcaaggccacacccagagagagctgcttctagccatgagaaggaatagcatgcccatgttcatgcattcttcagaaatttatcaaaatgtagcctctaccaaatggagcattgtttcttgaagaagctctgttatttaccttcacagtacctgccaaactcgaagagcttggaggcaatcattcgctcagttgtggcatttttgttgagggcttaccatgtgcttccaagtctgggcttccctgccattttgtgtgtagacaacttgtggaaaataggaaggtcgttgttaggatagggttaggagagggggagaccagaagaacccggagccattgggagtccttccaaaccctctgggggtagaataagtgacctgttcatttgacattgcagggcatctatcctccaagatgatgggaagcaggaaggagtctcctctcttcccatccctgtacacccatgccactgtcattaaggcagtggcaacatatgtggccacagctgaaatctcaagtgagggggagccctgaagtgggggacctcaaagccactcagtttgcaaacaggcatcccagaaaagctgcccttggacccctcttatactccttattatattgcattaaaaccccctgctctgttccattgataaagacagaaataaaaggtgttcttcctaatatgcagtcatatgaaccatatttgttcacttaccacataatccttaattacttccatacttttatgtataaagagctttgactgcatttctgaatatgtagtaaactgggtaaaccagaagtcattcctctctctaaatttgggcaatctgggtagggaaggtttagctttagggttggtgacatggcgcgtactatttctgcataaatttccttggagtcattgatccactgagtgtcaaacaaaatgtgatacccacaaaattcatgtatgaccctgacatttttccagtacttaaagtaattgcccttctgtttaataacagtgtttataaaattactttctgattggctaggtccatggaacactcgtgtcaatatctgctgcaaatatatgcctgtgccctttggacttggttttcaaaataattttcatctcttaagcgtggatcagtggcagccctgggagttaggagtcaaggctcctgtgcacggatcttttgctgtttggtcgtgggcattttggaattctcatggcagcttcctgggtttgcacactgaagtgaggatgggtcttgtgtcctctgtgatttctgtatctttctaaagggatttgagattatgaaatgagcagcccagcttaaggatttggtgctcccgaaagaaacatcgtttcactcttttattgagttttatgctctacattttacagatttagaaatgggaaattgtgaatgggtgattcgctatccaagatcaattaagtggagaggagatggtggtaggatctcccctgtccccccaaatccagtagggtgttgagactcttggatataagtaattagatttcaggcaagctctcaagcactcttgggactccatacccaacatttctatccccaagtgacttgcctgactttgcgggaccatcacctctttaccaaccagaggaaacggggtgcccacttgattctcactgaggtctctggatatggagataccatggagagaggaaaacacggcttcccatcttaaaatgaggctgaaccagtcccagggaaaagatccatgtcgttgggattttccattttgatgtaatgacttgtagatctgttaactaccttgtatcttttatgatttctcccagtgggacttccaggaacattttttaaaatgtaccttttcaactttttatttcaaaatatcagattttctaaaagagtttaaaaagatagtatgaggagttacctcatcccctttgcctaggttccctaaatgctaacgtcttaccttcccttagttcaatgatcaaaactgggaaattaactttgatgcagtattacgaattaatctatagaccttgttaaaatttcaccagtggcccactaatgtcctttctctgggccagggtccaatccaggacttcatgttgaatttaattgtcatagctccttagcctcctccaacgtggggcggtttcttcgtctctgtctttcatgaccttgacatttttgaagagtaacagtcagttactttggagaaaaacgctcagtttggatatttgcctgctattttcttatgattagattgaagctatcaattgtaccaaagatgccatgggactgatgtcacgtcctcagtgcatccggtcaggaggaacttgaggtgatctttccttactggtgatgttaactttgggtcactcggttaagatagtgtcctccaggtttctcagctgtcaatttttttatgtttatttttccctttatgatgaaaaagcatcgtgtgggcagatactctgagacaacacgggtcctttttcttttcatacttctgctcactaacgtttatatccgttgggcgatcttgcctgtaacaattattatgatgatagtccaactgtgatttttctatttccctcaatcctacatgtcttaaattcaaattcttctgtaaagaaaagctgttctttctctcctattggttattcattttgaaaaatcagtgtagatgcactgatatttattttatttgatgggttataaatccatgactgtcaatattttgttgctcaaattgtctcagatttggcaattgggagcatcttcttcaaatttggtatgcctccatcatttttaagcactcaggaagtgttttttgttttgttttgtttttacacaagcacataactaaaactgtaccaaaaggtacacttgtataagaagaattgagtctttctcttactccaaactcagcctaaccaaattgagcgaccatagataatgagtatattttaatacattttaatacaaatatatgcattaatttttaagcacagattgaaacacatcatatttgcagttctagactttgtttggttcttttatttatttatttatttttctgagacagtgtatcactctgttgtccgggctggagcgcagtggtacgatcttggctcactgcaacctccgcctcctgcgttaaagcgattcttctgtctcagcctcccgagtagctgggactacaggtgcgtgccaccatgcccagctaatttttgtatttttagtagagacggggttttgccatattggccaggctagtctcgaactcctgacctccagtaatctgcccgccttggcctcccaaagtgctgggattacagacgtgagccactgcacgtggccctgttggtttttcatctgtatattgtgcatatttttccacctcttccatatttttgttattaggttgttgcaaaaataattgcggtttttgccattgcttttaatggcaaaattaataataattgtggagatttcctagttcctttgtagagttctactctttttagagatctactataatttacttaaccattaccctgttgatgaacaatttgattatacataactatatatatatatattctctctttcataactggccacctttaaaggaagggcagtggggactgggcgggggcgggggagagagagagagagagaaagtaggtttctgtagaacaaattccaagaagcaggacttcccaaagatggaaacctttgcccatctgataggtttctgattgtttttatttgcatatctttaattatgagtgacattgaacatctttccatatgtttaaaaatcatttctatttctttctctgtgaattgacttttcatctcatttgcccatttttttcctattgaatgatttgtatctttctcaccaatttgcaagagcttattatatattaaggaaattagcccatttctgtcatttatgttgtaaatatttttcccggtttgccatatgccttttgattttgtttatttttttatcatagtgaggttttaggatttttatgcttagatttatcagtcacgttatggcatctatgacgtgcttgctccttgattttatattaaccccatgttttcttttattctcccccttttcaattttttttttttttttttttttgaggcggagtttcgctctgtcgcccaggctggagtgcagtggcgcgatctcgactcactgcaagctccgcctcccgggttcacgccattctcctgcctcagcctcccgtgtagctgggactacaggtgcgcgccaccatgcccggctaatttttgtatttttagtagagacggggtttcaccgtgttagccaggatggtctcgatctcctgacctcgtgatccgcccgtctcggcctcccaaagtgctgggattacaggcgtgagccaccgcgcccggcctcaatttttgcttttagatccttaaccatcttccttttattttgatgtaaaaagtgaattagggttccagttttattctttgtgtcctttctccaacccaatggctagccaattgaaccaaacaccatttattaaataattcttctttatcccactcatttaaaagccacctttattatttattaaattctcatgtgagtttaccctagttcagtatgctctattttactcaattgacatgtctgctttttctgcacctgtttcaaaccatatcaatgattttgcaattcagtgtagtatctggtcaggcttattcttttttttttcagaattttactatctagttttgtatttattttatgtgatatttaatcttattttaaaattatattccccagaaaatgctccgtagaatttttcgggggtggcagggggaggagaaggtaaaaagctacattaagtttatagatttataggaagaattaatattgttatgacttggagtcttacgtctaagagcaaaatagggcttcctatttatgttgcccagtcattctaaataattgttccttatttagcccctaaattcatattgaggtttatttctgggtatattctcttctctctcttttctcctctctgtccctctctctctgcctctctatctctctgtctgtctctctcattgtatcccattgtaaatcaaatctttttctcgatcatgtttttctaattggttattgtctgggttaacttaaaccactgattcttgtatattcattttataaccagccaccttgttaaattttcctattgtttttaacatcttttttcagcaggttctcataagtattctggtatggagtcatatctttttgcaaataatcataacctgctctttttttaaacaattttagaattcatgcttcttgctccttttccattgcaatgactaatatatttgagagaaatgcgcagtaagagtggtggaagtggacatcctgtccctgacttcagcgtgcatgatttcagcatttcagcatcgagcatctggttgtatgcatgttacagaaatatccttctatgactatttggttgattgtttatttgttttaatcagggatttgtgtttaaatttataaatgcctcttatggaatttgtggagatgatcaaatatttttctctgacataatattaaaatagtgaatcatattaatagattgccttatattaaaacctctttttatttaaggaaataaccctatttgatcaaggcctgttattctttttaatgtactactgctgcaatctccttaaaaatgttatttagaatttgttatttgcattgctgttacaaagcatgattgattgatttttaatattttcgtcaggtttgataaccatattatatcaccttcaaaaaaagaatttggaaatttttcttctctcttttagctcttagagagttaaaatagcatgggtgtcatctgtcttgagaaagactgataaaattaacctgtgaaaacaccagggcctggtgcatttttgaggcagctccctgagaactctttcaattatttttttcatggtccttgccctgtttaaattttttctctctcctctgtggtcaatttcggtaactacccttttcacaaaaaggcattaacttaatctatttaaagctacttgcacaaaattaaatattgtgttattttatatatattatttagtgtttatagttgtatccatgttactgtttctgatttcgtgaatttgggcttcacaaattgaagatacttggttcctcgttttctatattgtgaactgaatgttcatttcacctattttcttgctttcttattgaatagcctccttttttatttttattttttttttatttccatgggtttttggggaacaggtggtatttggttacatgggtaagttctttagtggtgatttgtgagattttggtgcacccatgtcccaagcagtgtacactaaacccaatgtgttgtctttcatccctcactcccctcccaccctttccccacagtccccagagtccaccatatctgaatagcttactttttttttttttttttttttttttttttttttatgagatggagtctgactctgtcacccaggctggagtgcagtggtgcaatctcggctcactgcaagctccacctgccgggttcacaccattctcctgcctcagcctcccaagtaactgggacgacaggcgcctgccaccacgcctggctaattttttgtatttttagtagagactgggtttcactgtgttagtcaggatggtctcgatctcctgacctcgtgatctgcccactgtggcctcccaaagtgctgggattacaggcatgagccaccacacctggcctgaatagcttacattttaaggattatattctccctcctgttatatctttaacccctatgccacacaatttttttaaccagagattctgcaatttccctttcatttccactttatcctgagtaatttctatctttaaaaagtttttaaatgttttttgttttgttttgtcttctattttaagaattaatatctaaatccatatacatcctacacagagactgttggcctatctgtcttaagcatggttctgtactagaattccatgtgagcaaaatgtggtctattgcgttttattccacggacaacaaaaagagtgtttgttttctattttaagcgaatggaattttgtgcatctctattggctttactgtatacattgtgctgtttatttcttcatatgcttcctagtttttaagtacttgattagcgatgagttaaagtctcactattttgttttggtgatttctgctttttaatttcttactttttgtatttgtttttgttttgcttcatattgttctttgtgaatttctttagtgtataatgccccacttaggtaattgggtcttgttcaattgattgttatgaagtgtctcttagtctagttaaacacctgccttaaatttaaacttaactgataaaattatcaaaatctttccttttttcttagtatgtgtttgtgttctgtctttgccaatcattacaattctaatctttctgattcactttaccttagatgagttaaatagacagcataatattttgttttcctttcatcatccaatgaaatggatatatccgtttcactatacatacatccaaagaaaagcatatttttattaatagataagattggcttacttatacttattgatgcaaaaaatgtatttggttctagttctgtgattttacattaaatctttcttttgtctttcttttgtttttgtcttatgttatctgagctttctttgttttattgtgtatgtacttgtatttctccattaatagtatagaaaagttgttgcattttaaatattctaatagttacctttgtatattttcataatactctcaaatctttttgttgatttattactttttgtttattttatttgttccttgttttaatatggaatccataggattctttttttttccttgaaatctaaaatgctccaggattttctaagactctgtttttcaacccaaagtctgcattcctttatttgaggatagttttcttttattacatctttggggttttgttacttttttggtacaagtttaaaagtgcagttttgtataaattctttttgtatttgtataagtttaaggatgtatacatttacaagtgcagttttattacatgaatatgctatgtagtggtgaagtttgagtttttagtgtaatcattgctgaaataatgtacattgtacccaccacgtaatttctcatccctaaccccccattttttgtgtgacttttcaaatactcttttttttcgggtgcactagttatgtgcatgttgaattctgtttgtcttgcttatctttttttttctgtcatccattttagttttggatgtttttaaaactttattttgtttgattggtttgatgggcaatgccttctcctatgaacttcagatactaattttttcttgcctcttttgtgatgcttagcatttgctacctaatttgagagtaacttaggtacatgtctggatccaaaatgagattcagctctgtgaggtcaggaattctgtctcctccatggtgccaagcagcagaccaaggtcctcaaagcagctcaatatatgttcttcattagaaccacagtgtgtggccttcagccagtgttgtccccagagaagggagagagcaatgagggatgaagtagaaagaggagactttttcaggacaggagatcctgcaggggccacaaaggcaggaatagcaaagcccagagctcaccgactcacatgcacacccccagtattccacattccattctgcttttccctgtagtatttttcacacacatgtgatccacttatttctcatgtctgtctatatttattaattccctgctcttccttgcaggaaagcaagctctgtgggggacagaaatttttgtttgctttgctaattagtacctagatcagtgctttgcccatagaaggtgttcagtaaatattttttgaatgaacggaagccaataggtgccaggcaagtgacatgaaagagtgatgtggacttgatatttacatacatatctgtttattgggctattctgctttcacgagcaagagtattttgttgtatcttacttaaagcatgctgccccaccatctcccttttctttttttcttcctctatgcttttttttttttttgtagtgataatttaggtacacaaaagggttcctttaccataataacaagaacacgtttagtgcaagaatacatgctggctgacactcagccagactcttaaggtacaatagggagtggtggggactgtggaaaactggagagcaaatgcctggcctcaaggggcagcctctgctctcttcctgtggtgctgccataagggaaagctgggccggtgttgccacagcaacctgtttttaaaataaaggttctgggtcttcatgtgaaacatcattactgctaaacgttcactcaaacatttttaaaacacacacacacacacacacacacaaatacaaaacaatgacaaaaaaactaaccttctttgggtcaagatcaaataaagcaagctgggtcctggaagggacagtggaactgcctggtggtgacattcacccagatggggaatggaagtcctgcaggttccggtgattcctggcttttcctcctgccatccaggggtctgtgggcaccctccctcctctgagacggcctctctcctgggccactgtgcagagtctaaatgtcatccccatgtgttgcagtggtggctctggagacatcggggtgagctgtctaaaggggtgtcaactcattggacagggtataatttcagtcaacgtgttcctgtcttattttagttcaacatcatttcccagttgcaaaccttttgaatgacacacgaaatgcaaaacaacataaaaggtcctccctccggcagatctgtgtccatgcagaactttaattattctttttgaatcctcataataatgtgctaccccaattctggcaaaaaaaaaaaaattgaaaagtctgatggaaaagatttgtgtcacctgtactaggattccattttattttttataatagtctttatatttttagaagtgctgaacaaaaggaaggggcttctaatcaagagtattctttagatacagagcatcagacaatatttgtgataaatagaaaataactgctctgatagtcttctgcggtgacatttagaatatcacgtttgtctttaggaagtatttttagtcagatttgaagaacagcatctaacatacttgcttggcagggaaggggcaggtggctatgtttagtagttttgagatactagattaaaaaacaaaattttcaccaggaatgaagcagttaggtattattagactttttttccccttttaagagcagcagaggtgtctctcatagatcattacagatgcttcgaaggtctttctggaagtaactgaccttccttctcacatatcgtgccagaattttcattccagagttttagaaagggggtgtggcctctccatgctgcaagctgggtgtacaaagcccagctcttctcagtggggggactcagaggctgaaatcaagcatcctttttttctctccagactcatcaaacagtccatattagatgaaatctgagcccaagagagctccattttctttgaaagctatgcagggtggcctccaagcgccagacctaaaaacaatatctttaaaactgccagccataattcagtgtgataaagtaactatgtttttgttttaaacctgagaacatgtaaagttacaacagacataagctgggtgaggagcagccgggtgggagccggtgtcccacaggctgggtggatgccgtggggccctggggccagcatcaggacatagcccactgggattcagctctgcagctgcttagaggccgggaacctcacagcgtcatctgaaaccacctgtgcttctaggtctttctctctctttcaaaccctctcctcttcaggcttctttccttgattaatttgtattttaaacgaaaacagtttgaaatggtcccccagacagcgtgcagtgcccttcaattcatatccgcactcctcaaaacagaagattaaaaataagtttctggcttctgcacttaaatggaaacctttagtaatcaaaactagctcaccatcaacttcccggcttgaaacgtccatttctcctgctgatgcaagagagagagttagttatttccattggctttcaactgacccttaggcagatgggaagaatgggttccctgttatttatttgggtgttttgggcaatttgctgtacataaaagctctaaatatggcagcagctgatattgccccaaagaaggaggttaataatgtagatttaaatggtgtttagcaaaagcaaaatctcagagacatcagcaaagttcaagtgtcattcagagtctatgaaccagcagtgtttaggggagttcaattttcctttggtttttgggggacagcctaatgcaccaagtgccatcatgtccccccaggggcatgtttggcttggggccatggcagggcctcatgcccaccggtgggtcagaagtggccgttctggatgtgttgttcgaaaacctaagatttggtgccttgctggagtcgcataatagacagcgtcactttcacacctcttaaaagtctttttaaaaatagtccctctagcaggaggcttatttgggatgctgtgctttacacctctgtattttcagactatctggggatgctttttatatatgttgttttaccctcagctccctggttccccgctacgcagctgtaggttgaaggcccagctttgggagtcaccagggagacggggaggtcagatgtttggggtggtgctttggggaggaaaagcaggctgctggccctgacagactcaccacctgcaggccacctcaccggctgcctgcgatgttggaaccccaaatacctcacttccctgacctcctgtatcctccaaggcagacaacctaggaagcccctgccccatcttggacccagaacccactcctcctagagtttttttttttcttttatctctgttaacagcagctctctgtccttctggttttttccagctaaaaatcttgtgtttttttttttgtttttttgtttttttgtttttttgagatgggatcttgctgcatcacccagactggaacaccagtggaacaattggtgtcattcttgacccttctttttgtctcctaccccatatccattccaacagcaaatctgcagactgcaccttcaaaatacagatagaaagaatagcctttgccatctccttatccaccctgccatgagatgggcctagaccaggaacagcccttatttcgttatcaaacagaatcctagctggtctcctggcttcttccctgggtactattttcagcacagtggtctgagtgattctcttaaatgttgcattagaccttgtcactgctatgctcagattcttgggggctcccaatgcctctagagccaaggcagtggccagcaatccccatgcaatctggcttgccactatgccctggctttgagtcttgctatctcttggctctctgccttgctcagtctggtctggccacactggcctccttgttgtgctcaggcccagcagcctcccagggcctttgcatgggctacagcctctgctgctacaatgacttctccatgcataattgcaaggttggtttgatccctcaccttttctgggtctttgttccactgtagcctctcagtgaggcctccctgagtcctcctatttaagatttggaccagccccatcctagaattccctctgcctctttctgcttagtttgtctccaggccttttattactgtttgcatgttacagagctgcaaatgttggggtgttatctgttttgtttgatagtggatcccgtagcactctgaatagtgtctggtactggaggggcctcagtgcattttgtataaatgaatgagtgaatgactaaatgaatgaacagactgactctacagagtcccatgtttcatgggttagagaagtggtgtcctttattggaaatgggcttcggagtgattctggctgtgtggtcatgactgctttgtgtgacttctctgcctctccttcataaatgactcaaagaggtccaggacttgtctggcgtattgtggggtgtgtggcactctggggtgtgggtatgccttgggagccctataatagcatagtagtcaggtggatgggtccaggctcagccgtatgcccatgtgacccctggttgcttggccctccaagttgacccctcctgttccctcctgtctttccagacccaccaggtttcccacacagggtcatctatgaaagcttttagcatctgtctccattcccactgtgaggacctgtgcctgtttctggaatctagagcctgccttgagcctcagggtgctgcccttacctcatcaactgctagctcccctgggaatctgagcccgagcccagaatgatctaacagtgttgggaaagcccttaacacatgcagtgatggcttcctaggtagtaacacttttatgatcatgccatgtattcttgattctgagctaccatcacctatataatgggccatctttggaaggaaaacaataaaaagcctgatctctattgtaaagtgcattattatttcaggcttgttcagttttaaatatgtctggagtcttggtgttgaggatctacagaagcttgggtttgttagggagcagggctgatttgggctcagccatcagggtgtgtccttggaataccaggtgatatggtttggctttgtatcccccacccaaatctcatcttgagttgtaattcctataatctctacatgtcaaaggagggacccagtgagaggtgattggatcatggaggcagtttctcccatgctgttctagtgatagtgagtgagttttcatgagatctgagggttttataagtgtttggcaagttcctcctttcctcactcttctctctcctgctgccttgtgaaaaaggacatgtttgcttcctcttctgccatgattgtaagtttcctgagggcctccccagccatgcagaactgtgagtcaattaaacctcctttgtttataaatcaccaggtcttgggcagtatctttatagcagtatgaaaatggactaatataccaggaatgcagccaggctcaaggagccagcttctctcacaatgaggccagagctgagggtgggcccacaggtgagcataggtaaccaagcacagctgagctctgcccctcacacaataaagggtatgactcactgggccccactctgacctcaccccccaatcagggagtcatgatcacttgaccaacagaggcccaagaagcattggatctcaaaaatcacctatttggattttcccagtgagaacaccattctaatctaggaggaaagctagttaacttgtgttggcctcattatatgtcctaaaatgagaaatgataattattaatataaactaacaatattaggaactaccatttatgaaattatttctccgtgttaggaattataccagaaggttgatattatttgaattattttagtcctgttaagaagcgggcaaggttggcattactgcatccaccttgcaggtgaagaagcagtgtcagataggtttaaaaattcactcaaggtcataatgttgagaggttatgaaaacaagaggcaaaattatctaatctccaggatccctcattcagggagctccccagcccaagtcagttcaaaccgtttctggacagaaacagtaacctggatacacctgcttccatgttctggctcctttatgccatgtaggcatgccatggactctgtgttggtgaatgacatgccctttgggggttggagctgagggctgaatgcatgggggctgagaaaggcctcttgacctattcattcccatgtctcaggacatccttgattaaaaaaaaatggtagctgccctatagaattgaaacggtggcagtggctaaaatattttaaaatgatttttttccacacatgtgggcaagaggttatattgtaagttcaatgctaatcacagttatttaccaagaaaaaaacatccatgtaaaagggcagggcatttggttccaaaaaatgcctgcttgattctgctaccggctgagtctgtctctatggcaaggagccgggcaggagacggctccggccagagcacggggatgataaataactcacaggtgtcagacacacacaagaattatgcgtgtctgacctatgaggggataaatcccacgtctctgccgatggccaggggatgcgtctttaagtgtcataaaaatttagcaattttttccccttcctaattatcttctatatttttgccagatttattaaaataagattttctgggggttattttttttttcttttcactggtagaatgtgctctttagtatcattttacataatttaatacaatttgttccatccattgattttcatggggatacaagctgttcgtttgtgagaaagctggcatcggccagagtgctggcaagacggcacctcgaggagctcattctggttgcaaagttcggtgggggcttcagccatttttaaggcaggtttagtggtgctggagcctgggaggccttttcccccgctacccccacttggaggctcaggaaggaggccgtccgctgccccaatgggctcaggagcaccgtgggcccctgcacgacgcaaggaagctctcccccaacgtgcagtctgatggagaaacacaggtgtttcttaattactcgtgcagaagggaaggggatgctgggcggatgtgcggtgatggtgaccgcgccagatagggatcccggccagcggcagcctgctccccgcacggcccccaccccggccacctcggtgttgcatttgggaagccctaacctccaggctgccctcccgtccttcccgggttttcttaattcaattggggttgtggatattttaggaattagccaaacccctgaaatgtggaggagagacagaatgatgggactggcagtaaggtggggagtactgggctctggagggtgggggctcaatgacctctttcatcttgacagggctccttcctgagcctggaagctgaagggtgccccttgctcctctgctatctgcctccctgtgggtctgtttctgggggtagataaatggttaggtaccaacggaggacatgaaagttctaggctggctgggtgctcacgcctatcatcccaacactttggtaggccaaggcgagagggtcatctgaggtcaggagtttggaaatagcttggggaatgtagggagaccccatctctacaaaaaaaaataagaaaatagtcaggtggtgtagtggtacacatctgtagtcccagctaatcgggaagctgagggaagaggatcacttgagcccaaaagtttgaggctgcagtgagccatggttgtgacactgcactccagcctgggtgacagaccaaggccctgtcaaaaaaaaaaaaaaaaaaaaaaaaaaaaaaaaaaaggctttctatgctggagctggaagacacaagaattgggttccagccctgcctccattgtgctgtgtgaccttggataggttgcttcacctctctggactcttaaataatgacactcttaaattccctcttaaataatgacactcaagttctctgtacaggagagaggggttccgcagattctctgaaggctctcatattctatgatgcgctgagctgtagaagacacagaccagggaggaattttcctgcgttgaccttcccctgacattgtcctgcctctaggggtggcctgagatgggcggaggaccagtgaggagaggcgaagatgggtgcaataccactcagctcagctctgaccctgcgggtgcagcttgcagtaatggctcagcaccaatatgacccacggcctcccagggctgggtggctccggccatgactgcttcttctctgagtgtccatcacgcctcaacccagaacccgtgtcccccgtaccacccctgcttcccgtggggagggcttggaaactgtggctgtcatgtcacacagacagacgggaatgcagcctcctcccgggtggaaggctttctgcacgagggtgccccagacagtgatgaatcatctcccctccagcacccctgggggaacgctaagtaggccaaatgaaatgatccgagctggctgtgggccagggcaacagggctaatccttgcctttgtgggagagcctgggaccagagggtctgccaccagtcacagccgcctgctacgatgctggccccgtggctctgccaccaccccaggaccctgtaggcctcctgactgctccttcaactccctgtgctttccaacagacatacagctctgcaccgaggaggacagaaaacatagcacagcacgctgcagagctccagctcatccagtagtcacttttttttttttttttgagacagagtctcgctctgtcgcccaggctggagtgcagtggtgtgatcttggctcactgcaagctccgccccccgggttcacgccattctcctgcctcagcatcacgagtagctgggactacaggtacccgccaccacgcctggctaagtttttgtattttttagtagagtcggggtttcaccatgttagccaggatggtctcgatctcctgacctcgtgatccacccaccttggcctccctttattttttatttatttatttttttgtttgacggagtctcgctttggagcccaggctggagtgtagtggcatgatctcggctcactgcaacctccacctcctgggtcctggttcaagcaattctcctgcctcagcctccgcagtagctgggattacaggcatgtgccaccatgcctggctaattgttgtatttttagtagagatggtgtttcaccacataggccaggctggtcttgaactcctcaccttgtgatctacctgccttggcctcccaaagtgctggaattataggcatgggccactgcgcctggcccaggagtcacttttaaagcacctaccgaatgcccacacctgtgggagggagaggagactggaccctctgcagctgctatgtatggggcttagactttgtgtggcacagcagggtaccaggtatggagagcagttatcactgaaggcttgctcagtgccaagtgctgggctaagtgctagacaattgccttttatttatttaattttgtttttttgagacagagtcttactctgtctcccaggctggagtgcagtggcatgatcacggcttactgcaggctcgacctcctcgggttcaggtaatcctcttacctcagactcctaagtagctgggaccacaggcaggtatcaccgtgcctttccaattttgtatttttgtagacagggttttgccatgttgcccaagctggtctcaaactcttgggctccagccattcacccacctcggcctcccaaattgctggggttataggcataagccaccatgcccagcctgataattgccttttaaattcttgcaacggtgcaacgaagtggacgtccttattatctcttttgtaaaagaaggggcaaggctcagagagatcaagtaatgctcaaggttacagagctggtgaatgcagaacccgccttgtgctggcctgcctgctggccgcagtgaaagggtgctatgacctgtccctcagtcctcataggctttggcactgtttgtaggtctggaatctgccacgagtttctctgctcctctggctcccctatgccgtttgtcaaccagtgcatccacattcactccattcccttctggggccgggcaggggaaatgccaagggcaggggcagtgagggtccctcctgcacagcagctcacagtgacacaggcacagtggtccctgctcagccagaaccaggtgatctgagcaaccccgtgccatccaaaaccaccaggagagaacacccatttgtgggcagctccactcccttgtttctgccagggagggcattgggcacagctcagccctgactttgagaaagtgtgaacttaaaaaacagctactctctagggaagagagggtcattctttttacaaaagttttatctgcagaatataagtgacagagtgggccggagagcaccaggggctacagctggtaacttgctgggttgggcaggcaagagaggttgaatcggggcattcttcatccattcattctctcattcgttcatttattcattgaacaatattgactgagcaactcatatatctcaggcactttctattaggttggtgcaaaagtaattgcgggtgattgcaaaagtaattgcaccaacataatggatttggaaggcaggatacatcagtaaataaagcaacccaatcctcattctccaggaagtatcccgtgtgtgtgtgtgtgtgtgtgtgtgtgtgtttgtgtacctgcgtgtgtgcacacgtcctgcatttgcatggctgtgtgtgcctgggcatgcaagagcatgaatttcctggaagagaaaggagaccccgggcaggaacaagagcagggctgggcctccgtttcagccctggcccgcagaccctgccagcagcttctgctgagagaggagctttgaaaaatcctctgttctccagaaagccctccttggcacagccgacctcccttctgcctgctcttcctatcttaggggctgcgactgctacccaggctcagtctgggtcactgtcaggacttgctactgggccaaggtcagcagaaacacccacccagggctttaggtgaggccaggctggtgccacggggaggctcccttttattgctctcccagccacttgctgaaaaattaatttgcacgtgaatcacatttattgagaccttctggatcagataacagatgcagaccagcctgttctgcaaggccatccagagaagaaatcctaaaaaattcagtggacaaagggatgtctgctggccgaggctcgctcctagatcaagcccctccctcgaggtgtgcttgtgtgtatttggaaggctcccctggcatcagaggctccaggctccatcctgcaagggctcctggagcggaggctgggccgtgcagccgggcactcccgaccggctctctggattggttctcctgtagcccctcggaagcaaccaggagccggccctcccctccctggccatctgcttgaagcatctggtgatcaggtgcaagccccacaccggagcattcaagctgaaatgtgcagtcaccttgccacccacactcgcttttgttacgcagccaggctgcccctctttgtgtcggggagaacagtttggggatggaaatccgactgctggcactgggaattcaccatggctgagccgagatcctgcaggccgagaggctggcccagtctccagacccggctgtcccctcccaccagggtccatggacatgtctccagcaaacgggttggctttccagagcagggagaagattgctcacgaatgtcttctttacccctctgggtccagcaggtctcagatatttggatcctgccgtaaaggagaaatgcttgtcagttttatgcctccaccattacttaggaaggaaagggtgggttactcccagtgctactgctggcctggactgctggcctagagtgatcgatggctcttcaaggggtgattccctgggttaccagtgacgggggattgggagaaggctcaggacctactcctgaggccgactgcttctgcgctaacccaagcatcttggagggcaacgtgggtgtctgtattgttgaaaacattctgttcttcagctttaataagcacccatcagagagcactcgaggattaatatgggggagttttcatcaccagagagtccatttcattttctgagccactgacgactcagctgagagctgcggactcactgcaccaagaggtgcttttgtttgattttcagtcttataaaacacggcccctcttgccacctccccaaaccactataggcctgtcctcacagctgccagagcccataggcgttacatttagcgttcttctcctggtgggggttcaaggtaaagatctcacagaggacagaatgggaccgcatttgaaactattaactgtgagtaatagttcactggaagaagtctctttgggtttgggttttagtagctctgtgtgaccttaaagatgaaagtgatgtcctactatgtgctggggacgcattttctgttctttctacaatagccatggtcattactctagaatgttgttacatgaagaaacaccaagaaatgtgtctgtaaaaaccagaagtccagccaggtgaggtggctcacacttgtaatcccaacactttgggaggccaaggcgggaggatcacctgaggtctggagttcgagatcagtctgtccaacatggcgaaaccccatctctactaaaaatacaaaaattagccaggcatggtggcaggcgcctgtaatcccagctactcaggaggctgaggcaggagaatcgcttgaacctgggaggtggaggttgcagtgaggtgagatcacgacattgcactccagcctaggcaacagaacgagaatccatctcaaaaccaaccaatcaaccaaccaaccaaccaaccaatcaaccaacaaaccaaccaaccaaccaaccaaccaaccaaccaaccaaccagaagtcctgactaggccccaatctctgtctctacctctcccagtgttaattgtgacaagcagtttgatgttgcttaagtcactgctggctgaaattagtgagagattttattcttgagagacacagagaaattagaaagaagtcaaaatccctgactgactccattagttcatctcaatcccaagttatcttctttaaatgatctggaagattgaattcatgggtatggacaattaaagggtggagagaggaggaagagggctgtggattacagattctagatggtccatgacatgcctgcttgtgagagttctaccagccaagcccttttcaataagatgatcaaagaggaagaacttatcttttaaatttttggaaactctcagcattctataattgatccacttccttagtggaaaaatagaacagccaaaagtcttcaatcttagatactggaatgaaagctaaggttgttcacaggtatagaagaagctgattgtggtatcagatggaatctagctgtcaaacgcttccacaggaatagatagctcaggatgtcgatattcaattgtatttattcttatttttattgtgtattgacaaattctagttttatataattatgaggtacaaagaggagttatggttttaaatacgacgtgggaagattgaattaatctgattaacatatcccatcacctcaaatatttaactttttttataagaatattacaaatttactctctggtaatattgaaatgtaacaaactcaactgttagctatatttgccatgtaatgcaattgatctaaacaaaaattcaaatgtgttcctcctattgaactgaggcttcaacttctggtaaccaccattctgctctctgcttctatgagatcaattgcttcagagtccacatttaagtgagaacacccagtatttgtctttctgtgtttggcatatatcacttcatataatgttccccaattccatccagattgtcacaaattatattagattttatttttatttgatttttaaattttttaaattttttaatttttttgtagagatggggtctcactatgttgcctaggctggtcttgaactcctaggctcattcaattctcctgcctcggcctcccaaaatgcaggggttacaggcatgagccattacacctggccaatattagattttaaacaccccctaaggatctttaattttaaagatgtcatctttttcttttcttcttttaatcagcacatcagtgtaacatgtggtgctatttccctcatgaaacattgcctgtactaagcatgtgcctgaagtgacactgcccctgcccccacctccgtcgtaccccttcccaggagctcaggctgcaggaaggtcgtttccattgcatccctgtgctagctgggcagaccatccctactggcattaaagacccaaatgtctttctctcccgcctcttggtggagcatgaagacaaggtcccattggcttaaggcgcggtgctggctttctccgattgttgtgccgtaagttagcaggataagtttgacagtaatttaattttcattgacaaatgctgtcataatattgagaacaaagtgatatattgtatcaacaatagtggtcgacgctcagccagtcatatggactgggcgagcaccatatggttcttctaagctcgacttggaaagctctggctaagaacttgacaagcttaagataccagtcaggaaaaatgattacccttgagaagttcctgccatgcctccagtctctgaatttcctagaaaaaaggagggagtgcttcctgggtaccagccagggtccaccatacccctggtcggagcagtccctcaagggcacctctgctgacagccggcataatcgaaagtcctgagatgataaaacaccattgatttcctgttggtttgtgtttgttcctggctgtggtcctctccacttaatgccggtgaatgttgcatccacgcgtgtgaatgaggccaggactgaagtctggcccacgttacaaactcacacaatccaaccagaaaggggacgggattttcatttcgggagtgcagctcgttatggctgcatctccagacccccttctgagccaagcagagccagagccatgagtagattacgtgtcagtctttgtgtgcctgggtacgtgtgtgtctgactaaactcttagccaaaatctcagctagatgatttgaccaaaagtgtcaccactgtcaaaagcagtctccatttgttctgcttttctaacactcagcttattttaattctggttactgtacatagaaaaaacaaccgatgagcaaagttacaaacaggctgggagagaagaaagctgggtgtgtgtgtgtgtgtgtgtgtgtatgcgcgtgccccacacgcgcatgtttagggacataccatatccccatgcacattcggctggtgtccttgtctggtttgccaaacgttcaggcactttccattctctgaaggattcccatcccaaacaacgctaagtaaagaaacaggcatatggcgtggattggagatggtgcagtgttggcacagcccttctgctgtggtgaacaggtatctggaaaagatgacagtccaattctgctctttttggagtttatcatttatttggattttgtggttgttgctttgtgtttattattaacttaacaaagagagggagagtgtgcaattcacagaactgggcactggtacaactgctctccaagatggctccctgcctgagccagggctgtccttcttgcaaggcactctcttgtcccaccctgtgcggatcctcggctcccaggcactctggccaggagcaagggctgcctgcaaggtgcagggggagcatctaagtgcagaaggttctctggaggccccaagagctcctgggtgtggctgggggtgtccttggtcttgaaagagagtgttgacttcaaaaagcagggcagattggaggagcagctgccctccttgtggatggcatccgttggtggctgtgtaaagaggagttccggactgcctcccattaccatttcattacgcgacagcagacccatacacagatccatacgctgcctcttggatggggtttccaaacacagcaggacactgcggagagcgcttacctcctctcctgcctgctggaaacccagctccctgccatgtggcgctttctgagctgtggctgcaggctctccccgggtactccagctgatgggtgcccccagaggatgagtgggccgccggagagctgtgcaaggtgccagtggctgcaacgttttccagaagggtctctggagagaatgttcaggaaaacacccagccaaaggatgttttctctcccaggtacctctgggctttggaatcttgcttggtggggcccgggtgtggcgtgtcatcccttcacaatggtggtcagccatgagacatggtgaccacctaacaggagctggcttttcttatctaggctggactcaccagcattttaatgatgagggaaatgagataaccaggtcctacgcagacaggaaaagtgagagggtcattggccctatctgctgattccaggatgggtgatcatctcccccatggcaatgtgggggaagggattggggaccggatgcgtgtcctggctccactgtggctgagcaaagattcccatcctcatgaggcccttgtctcttcatggataaaagaaaaatattgcttgtgaaaaaatgatgatttcccatgttcttcaagtaagaggctccctccttccttcctggggatttatcatctttatgtttaaagagaaaagtccacagggtggaagcacagaaagttattctttctgtctgtttaaacccattttgcgatgttggatttcccccacccatttcgggtgagatctaggcaaggtcccacaatatttttggacactctggaataacgcagggtctttatgtgcctttgagtcataaaagaacctcattttggtcatggaagcacatgtttcaatgtcatactcctaactccaagcttcatgtagagtgggatcattttctggacctggctgcagcctgttgcgggcctggggacgggggcaggccgtgtcttctctggtccctggcctcatgttttcctttctcctgtgcgttctggctaccctggtttcgaacagagtccgcagaagaagtcagggctggaaacacagccatgacagtcatttttctcctgggctggatcctttctggagttctttgggctctcccacatctctaggattctgtcacctacagtttgggcatgttgcctctggctggctgctggctgctagcccttcagcagtgaacatccagtgtcttcctggtgagttgtttcatccttttaggcagcctcttgggcaaagtccttgacagcatttttatgcagagggtccttccatactgacccacatctggaccttgggaaatattcttcatgtcttccagcaaactgaaactggaacctttccccatacaggcctcttttcaacccaccctaagaacagtctctagcctttccactttggcatagctgggtatcatgtcctactgacaccaagggacatggaacaggttctctttgagagtccatcaactgggattgaagtgaaggaagcaacttctgtccatcccctgtggaaggagggctggtaataacatcacacccaccaactctttccaaagaactcttctattttgcaactctctgccttttcaaattatacccttctatagactcaaattgggtcttggcatgaggttgaggacacttgttggccagtcttcattctcaatttggataaagcaagcattcatcctttacgctttgtggtcagacttttggagtttccatctaaagagtaacaaaagcacatattttaacatccttctacccttgatgatcacatagctcttcttccaatccaaacccaaatctttttctagagcatcaccccttttttctcttttgagatacttggcgagagtagagtttattagttttgcacttacaatagcccttctggtacataaacattgattgagctagttgcttctcaccttgcttttctgagaaagactgtgtcttttttttatagcaagggttagacaaaggcagcaaggtatttcgagggtttttttgcaaagctggtgttatgtagacaaaatagattgcctctgtactttgtcttttgctctgctgttggatgtttgggacatcacagcacaacccaaacatccttgtggcttactcatggaccacccagaagtagtcgatgcaagccctgaaaactctttcctgaatgttccagtctgcatcaaacaacctggtatcagctccagatctgttgtgttgacactgcttctggtctctgggaaacactaaggtcaaacttgatgaaagggcagaaagccaggccagggtggctggtctttctcaacccagacctctgatccattttagcatgtctcttccatcagtcgtaaggacttttaaggtcttaacatctcacactgctgtgttagtctgttctagatttgctataagtacctaagactgggtaatttataatgaaaagagtttgaattggctcacagtcctgtaggctgtacaggaagcatgatgttgcatctgctcagcttctggggaggcctcaggaaacttacagtcatggtggaaggtgaagtgggagccagcacttcacatggcctgagcaggaggaagcgtgagaggggggaagtgctatacacttttaaacaaccagatctcaggataacttactcactgtcacaagaacattaccaaggcaggtagtgctaaaaaccattcaagagaaatcttcccccatgatccagtgacttcccaccaggccccacctccaacattttacaattctctacatcagatttgggtggggacagagacccaaaccatatcaactgtttagtcttctgactcactggggagaatttgtctgggcttctgaggggattgtaaggtagtcatgggccagattaggacaagagcaaaactttatatatctttgcagtcaagaacaggacacattgctgtattatgcaaatggaatcttcttccagctaactctttcttgaagtatttcaaaactgtctagctctgaatttcagatattgtactcttagtctcacaatttccagttgatttcttttggcgattcccattttctacctaaactccttatcttgtcatctattttcttaaatatatcaggtatagttattctaaagtctgtaactctagaactcaatatttgtatctttggtaggcctgattacattagctgttgcctgattttctgtctttgtttttactcatttggtcgtatttcctggtgttcctggtaatttttatcaaatgtcagacatggcgtatacaaattttagagatgccttttgactgtatgagaactgccaaataggaatgtaatgtgaaccacccacgtcatttaaattttgtagtagcaacattaaataagcatgaatacatagttaactatttttaagaacgtattttgttgtatttaacctggtgtacccgaagtattatcatttgagcaggtaaccaatataaagagtattaatgggacattttacgtgtcttttttgtactaagtcttggaaatccagtgagtgttttaccctcatagcacttctcaattctgacaaagccccatcccaagttcccagtagccacatggccgtcagctaccctggcaggcagcacagctctggatggtgttatcttcctctagggaggatttacttttgtttccagtaggccattaggcttgcggaagatcaccataagtcaatcagaaattgagcagattttaaggatttatttcttatctgttcttactccttcttctgcccctttaggggtaacaaataagtgtgcggggtgcttatcaggaaacttctgccttacaaagccctagattctggtgtttatcttcttggtcccttggactacggatgtctctgctttgcttctcagcatctcgttggctgccatttgtaagttcacaactgtctcaaggggaaaagcaaagtcaaaagcaagcccagcattctgtgctccttcctttttagaatcttgacctgtcaagtcttggctcctttgataactctattacaccttgaaattatttatatactcacatactggccaggtgctgtggctcacgcctgtaattccagcactttgggaggccgagatgggcagatcacctgaggtcaggagtttgagaccagcctggctaacacggtgaaacctccatcactaccaaaaaatacaaaaattagctgggcgtggtggcacgtgcctgtagtcccagctacttgggaggctgaggtggaaggatcacttgaatccgggaggcagaggttgcagtgagccaagatcacgccactgcattccagcctgggcaacagagtgagagtgagaccctgtctcaagaaaaaaaaaattggttatatacacacaaatacgcaccactgtttttttcatgcagcttttctagttgtgctcaataagacagttgatttgttacaggctcttttactatagccagaagtagaagtaaaataacgtcttaaataactaaaaccagattttcctcccctgtttggcaatcagcactgtttcagcctttgagagaaaacttatttctttacttctgactcagcacaccaaaatctctggggaagaagattatctccccagttctaaggactggcaaattgaggtatcgtaagattgtgcctcgcaagagtcaggcccaagatcctccaggcttctccctgcaccgtcttaccagcctgcaaggcagggaggtttgctgacctggtgtttgtactggtagctcctgaatatccctctgtgcaggcacaggcactccatatcctatatgaagtggtagcagtggccatcattccaggcaagcttacagtttcacagagatcagaggcacattcaaaggacattcatttcttatgcagcatttactaagatgttgtcttataccagacctgggctagggcctcgtgtcagcagcagaatgccgtcattcacagccctgctgttggggagcacgtctcctggggcacatcctggtttggtatgaaggccctgtctgggacatagacacagaatgctgtggacacatgaaaaccctatgcagctgtacacattcccacctgcgtaagtctctagttcagcttcagtaccgcttagttatctctggatcagcagctaaggccttataatatttcaagtataaaatatttaaataaaacattttaccatgttcgtgagataaaatctttagcattaatagaaattttactttttcacaaaaaatggaagttaactgaagcttacttttaatatactacatttaacccaatctgttttacttctcaaaaaagaaatcaacctgtgttttcttgaaagaaaagcaaattctatttttttctgttctgattatttaaaaaatagaaaaaactcccagacattgcttactgcatgaagaatgccacagttttagtttatctcctttcagctttcttcctgtgcctagcttttatggaattgtaatcttgctgtcatatgatttctgcatgtcatatacatgtaatatatatgtgtagtatgaaattttttctcatgttattaaaacgtatatgtataaacgtatggctacactaaaatatcattatatagttatttaccctattgttgaatatgtcgactgtttccaatgtttttattattacaaatataatacagggaatgtctttgaacataaaggcagctcctcttattccatcttcaccctcgtgctttagagtatttctctagggaagaccaccagaaatggaattactgcatcaaagcaatgaaatatttatatcctttttcacttaattttaaacctcagatttactcctcaatgggaggtcacttcccgccaaatctcaaatccaagacaggaattaggggcttctcttggccgggatgtaatgcctgtcccaagatgaggagacctagaggatggcagtagagtggggcaagtccttgaaggtgtttgaggggttggttgtggatggaaaagcgactctgattgcaaagccaaggataatagtacgagccaaaggaaagcctatttaatgagattggccatgcacttgcaggaaaaccttttgagaaaaaagcacagcaaagtttgcgggaccacctccctctgcaatggctgtgttgatgggggccattgctgatatggcgtgggtgttggattttgggaaccgaatcctattttagatgcattgtgagctgaatcctattttagattgactcatgtaaggaaccccgtggtgactctataaatcagaaagttcgtttgcattgcaaatcgccctttcctaagtaatcttcagctccttaattttacaaattgtatattggaaatcttttatttctgtatattggttgttgcaaagtacacttggaggacacttggggcccatttcaaccagggggtttgagggtcttgttgcaggaaagttcttctagtcaatccttccctgggggttgacagtctgtcctccatctctggtggacagctgatggcatttgccttccaggttaagccccagtgagaaagtcactgccaggacccgcaagttgaaggaggaatggacctcaaaagcttcagaggggactgaaatgtgttggctgattagaaggtagaaggtcagagagactagagaaaactcaaggcgtgagctgagcctcgggctgtcattacggagaggaggctgaagtttcagaaggaaattttgatcatcagaagtgcctgcaggaggtcctcgactctagcaacagattagatcccactgagaaaggagagactgttgtgctgcagaccggttgtccagatgggtttcaggagatgatgcaaaggctctgtctgagggtgagatggatgagtcagtcagtgccttctttgagtggatcaaatatcggtagacttggatctctttgtcctgagcacctgagtgaaagaggctgtgtggggggtgagagcccagctccctgagggacacaactgaggtgtctgtctaacaatggcctcagcactgaggctttcttttagccttttatgtcaacaccaaaagtcatggagctgggccttagaaacattgttcaaaagtcatatcttaagttatgacccgtcttgaagtatttataactgattggatttcataagtaaagccagatttgcataaattaataaaatatttcaccaggtagcatcctttcccaagttattggggatcctgtggtgggggaacgggtgcttcttctcctgctgggttcatgaatctatccattccactgggactgtgtcctccatcccagccttggctgctgaaaattgtgctaaaatgtcactgaactttgcaagttacttaatttgctggggtattacttaaatctccaaacctaattggaggtggatgtgagagaaacacactaagacccacactcgacttgggaagatttggaaagagtcccatgatgtcacgtccctgctggggcttggtggaacatttatacaagtatcagtaattatttaacaatcaccttgtcctaaacttttataccatttatacagtgtttaatgtacattgatttcttcattttacatgtagtaattaattttgtcttactgacagatgattctcaatgactgatttcaagacacattccggacaggtactttttaacgcttcgttttgcttcaaaaagccttattctactctggggttctgccagctatcgcaaagcaatttctgcaggggggggttttggggcaccaacctgtgtggaagcatggaggtgggaggtgagttttcacgtacattgtatgttcacttagggtagctttgggtggaagattgggagttgcgttggggggtggtgcttacatctcccccagttaacccttttctcctcttagtgaatattgctttaggccatgcttgagtgaactccagggtattagaaaaagatttctttgctttagaaagcaaagtagaaattcccaaattcaatttgaatcaaaaattggggggaagtgatagaatgaaccaaattgaaaggcaaacattttttgttattgatttcacgtttcgatctctgttacatgtgttgtaaatgtcatctatcccaaggtgaaagcttcagagacaagtgtttaaaatggcagtggagccacagataacaagtgagctctgtggtttaactttacttgttcaagaagtgcttgtccacttcagttgtccctgggagatgttggaagagggatctgcagtcaaaacacagtggggtgcattttgatctgctatgcttagctgtttctctttatatgtatatttttaaaaatttcctccttcctttcattcttagtttgtaatctctaagcatgaattcataacgatttggtttaaagtatgtacgtctccagagttaaaatggagagaaagcctatagtggacatttctttcttttttttttaattatactttaagttttagggtacatgtgcacaacatgcaggttagttacatatgtatacatgtgccatgctggtgtgctgcacccagtaactcgtcatttagcattaggtatatctccaaatgctatccctcccccatcctcccaccccacaacaggcctcggtgtgtgatgttccccttcctgtgtccatgtgttctcattgttcaattcccacctatgagtgagaacatgcggtgtttggttttttgtccttgcgatagtttgctgagaatgatggtttccagcttcatccatgtccctacaaaagacatgaactcatccttttttatggctgcacagtattctatggtgtatatgtgccacattttcttaatccagccttttatttgttggacatttgggttggttccaagtctttcctattgtgaatagtgcctcaataaacatacgtgtgcatgtgtttttatagcagtgtgatttataatcctttgggtatatacccagtaatgggatggctgggtcaaatggtatttctagttctagatccctgaggaatcgccacactgacttccacaatggttgaactagcttacagtcccaccaacagtgtaaaagtgttcctatttctccatatcttctccagcacctgttgtttcctgactttttaatgatggtcgttctaactggtgtgagatggtatctcattgtggttttgatttgcatttctctgatggccagtgatgttgagcattttttcatgtgtcttttgcctgcataaatgtcttcttttgagaaatgtctgttcatatcctttgcccactttttgatggggttgtttgtttttttcttgtaaatttgttggagttcattgtagattctggatattagccctttgtcaggtgagtagattgcaaaaattttctcccattctgtaggttgcctgttcactctgatggtagtttcttttgctgtgcagaagctctttagtctaattagatcccatttgtcaattttggcttttgctgccattgcttttggtggcatttctttaaaaaaatttttttggggggaatcaatgccttggtgccttagcatcagaggatatgactattataggacactcctgttattattaatgaggaggacatgtatccttcattttgcaacttttcatcctcagtgaccttttaaatatggaaactgttgaagtcacattttaatattaatgaatgatgtaaaaggtaaatgaagttcaaattattctaatacttgcatgttaggatctgtgtctatatccatatcttctccacaggcttgtcataactttataagtgtcaaagggatttgagtgtgaagccccacagatgagggccgtctgctagtggctgcagcccacttagcggatggcgccaccctgcagcagggagcttcccatctagacacatatgttctgatgcttttggtcattattctgacctagacattcaccaagaatgaagaaactattcgtttggcgaacaacacgtctgcattttgggaaagttcgccatgccgttgcccagcctggcttcttgctggataagctttgggttggagccctgaggacagcaggtctcagatctagtcaccgtcttctccagcctcctgctactgcattctgtagctctgtctccaagtgcaagagtttggcccctttggggatttctgccattattttttcagagaaggtattcagctctggtttggcttgtagcaacaaaggtctttttgtgtctcacgattcctctcccctctgcctcttctttcatccctgtggcatctattattaccgtaatgtgactaagggggcctttccccctgtcatgtgcctccccaactgtcctggtggaaaatagtatgttcttttttcctttacatccatcatttccacctaagcacagtatagcagcctctggggaaagaagcttgagcctgcgcacacatgttcacgactgtgtgtacacgtgtctaggagcacgaatgtgcacaatgtgtgtttaggcaggagtgcatctttgcaaggtgtgaaggtgtgctcatgaatgtccctatgtaatgtgtgaatgtgtgcatgtgcgggtgtgtgcgtgcttctgcatgaagccatcggtgtgtacgtgtggatgtgtgactttgccggtcagtgggcacagctgttgatcacgcactgtccagaccacagtgctttagctccttctagacattttctccacctttatttgtgttaattactcaagtggcaattagtggctctgccccccttttggtcgcagtctcgtagtatttgagggatggtcatgtattcatcatatttcaataaatcctttccaatgttattgcccttgttgtatcaactggcacctgccctccgacgttacacctgcaggagaattccaccacgtttgggcgcatttccgaagcaaggctattgatgttgtatgtttaaaaaaattaattaaaaaaactcagatctcgggaaattccagcagtcagtctcctttttttatcctaatctcttcatagtaatgctcacaagtacccttggtccagacaattcttcattcattctccaccccccaccacactcacacccaaactccccaccgctggagattagtcctttgtgagtcagtgcacaaaagctttcttaaagtcccagtaaattatacccctggtttccctcttgaattcctttttgttactttttcaaaatattctattagttttgttacgtatgatctcccttttgtgaatccatgctgaatatctttaattaaatcataactttccctattttgtccctgattagtgtttccaatatcttccccactgctcaagtcaagcttactggtgtttaatttctttgatctccctttgagtcgttattaaatataggtgttgcataagggctcttggccactggtgcttctcccgtttccctgggtgtttttaaaaggtatttgctaaccgttcccctgtttccttgcctcttcttgcacaaattctaagatggttcccatctgctcccggagttatcagtccttagacactctaatttctttctcacctgttctgctactaggctgatttccttcagaaatattttcctctccctgggaaatgcttgtctgttgctggcatctgctttcgtcttccctttatggacatgaaagcaaataatttatttttcattttctctagaagttgtcatccctccttccaatcaactatgttctatgtatgcctccttgtgttttttaaaagagcattataaacccagttccagcacctccttgctaagaccccaatttggaagtggtatttcctttccaaagggttgatagcatcaccaacttttaatctggggcagggagtgctgaccctttgctagcgaaactgttttggatgcccccagctgtcctacagcaagcagcatgaagtcttgaggcttccctgacaaccggtacaagagggacctggccccatctccgggttttagggagttgtgaagtttcccacgtgtcgctttggaaatctctcatatgaagtcagcttcagccaggaagcttgccttcacttttcttctgctcagtgcctccaattttcctcacacctgagggatgcatcggttctcctatggctcgctccccttcaggctgtactgtgggctcatcctcagatggaatttccttccttttctgcctgtgttcccagaacacagactaaaaagggctgctccatgcagaaggtgcacacccacgggctttcagatgctcttagctgcaggtgccctgtcaaggggctgggcccacaagaagcggttccgagtccccaacctgcggccgcgtggaagcctcctcagatagcactgttcctctcagcttgacctcatttccttttccagtacaacccagatctgcgtgctgagacatcactctcaggttgtaaattctacaccaaatcaaaaggccaaatcctttctgcaaacccacaggcgctcgacctacatcacaccaaggagcctggccccgatggctatctcaggacccctgggcaggggcagcagaggtgtgagcccccacccctccagcaccagctactggccttctgcaggacagcaacttccccggatcaagtggcagaaacagcatcagccaacgtttccacagagtatgagtcataaatagtccttttcacattgtttcacatcaaaaggcaagcagcctgtgctgttccccgtccctcatccctaacatagaagtgcgtgaaatttgcccacaaacaaggatttgaaattttaaaagctcaataaaggtagtcaatagacacactccagtcagtttttaaaaagtgtttttaattgggtcaaatagcatgttactttggggaaaaataaagatcatttaaactggttcttttagttcacatgtttttgaaaactgattttctggtgcagacctagttcgaaatatcatccggaagtgctgatgataaacgggtgggcccagggttccctctgaactttagggggttcttcttcactgtttctccgaccactgtttcttcactgaaagagtctatagtctcttcacttcagggcgatggggtaggacggctggggtcctgattccatagttaaccaggatcaaccctgggtcttgagccacctcactgtatgcccgacagctgccccagacagggaggacagtcctctgtcagcctctgagcaatgttccagaagcaatttatagatggacttggtgagcaaaaagtgagagtcacaggtgcttcataataattgcttgcacatttccagaatcggacattctgtcatttaatagacctaaaactaaaaagcttttgtctgtgaaaggtgaccagtagaaacagcgtttggattatatgatatcccataacttaatcatatggctcttaacagggggacatacacagctgtgtctcactaatatgcatgcaatatgtgtaaactgatacgctttaattctaaacttgtttttagcaggaagaaaaaagcatttagatgaggaacattaagattcaatattaaccattttttcccctttgggcaaaattattcatcacttgatatttattaaagcagcattttccttttttttttttttttttgctattgtgagatgcatcctgctactgattttccaaacatcctcaaagttatgtggcaaagtgaaaaagacacaggaacagccagtagcccctttggggtcacaggaaaacaatagacttgaaagatacacacttgttcttttgaagcccgagagtcatcctaacccctaggacctagtgacaggggcaaagttggagtaattaatttagaagggggctgactggttttccacctctccaattacacatatttgatttgcctatcctgtctgacgttttaattgttagtttatactggtttaatctgaaatatttaagtatatttgctttgataatcttaactaaaaaaaaaaactaagacaaaggaattgtagattagagactttattttcagggcaaaatgatacgggtaagtgaacatcaactgaccagaaattatttgcttctgtctgttagacacgtaatggagtcatttaactagtcaaattaggagctgcagaaatgcaccatgcttcattactgagttcgaatgggcaccattttacatttacgtcaaaaattatctcatagcaaattaatgttttcattgtgcagaaaggctgaagctatgcagtgttagcggcacctagaggccattgcgaaaatacttcaaagggatgatctgcaaacaaggacaaaatgatcaatagatgagtggtggtggtgagagccctgaccccgtttgaaagtaagagtagtcattgaatcagattggctctcttggtgaccatatgaagctctgaggggccatgacggttttcctaaacttggcctagaactaaatgtgctgaaagagccccaaagatttctctccttttcttgttactctttaagtcctgaaaatatctgtttttgttttgttttgctttgttttcacagtttgagtttgctttttcttttacctatgggcttacattatatcagaatctcatatgttagccgatgagcatttctgtaaataagcaaggagagattttttttcctcccacattgtaaattggcatccttagaatctttcttttgtcattggtaaaaacttgctgtccgtagaaagaggcaacacatgacactgtttcatcttaaaaaatactgaactgggtaaatcctccatccaaacagatgaccaaggttggttgttgtcccaagaatgtcaatctctgctcaatttagcgagaaatcatgttaaatgaaatggcaaagccctcaccaatgaaaatatgtgttaaaatgatctgcaagtcgtcagtgacgctgggacgttggagcatactgtcagagcagaagcaaaggagagaatggaagcatataaatagcattgagaactcgagaatatttcaagacaatattgatgtctaaaatatatgtgaatgactgcataatgatcgaggcagacataattcaaagtacagtcagaatctggcctccaactcagagctttaaattctccaaaagacatctgtttgctgagaaagcctcaccaacagctgcgccacataaaggggagaacccgggataaggttgggagttggcaggtaggggagcctcagaggggttaggtggggtcctggagggcgggcgcccaccttcactccacaggtaccggaagcggggctgctttggacaaaggcgagggaggtgcctgtatttcctagaaccaggtagcaaatgttgcctgtgtgtttcatcagaaagcgccccagttgggcactgtgcctcttggatgctgacaagaagatttgacgttacttctctggtccttaactttgtttacccagctgctattcttcccatacttaactctttcaccgtgcagaaagcaagggggagggaggaagggaagctccaggtgtgatttttcagaacaaaatataatgctgtgatttatttttaaaaaagagaataagcacgaggaaattgaatagcatccatttcatgcttaaccgtggttcacaaatgatagtttgtaattaaaattctgtctgcaaacctattctgcagaccccaaaagaaaacttcctcagaatgttatcaactctccaatttctgtaaagatgccatattttcagatttcaaagagaggatctccttttgaaaataaagaattgttgggtatcgtatgagcctgctaagtacagcattttaaacccacactgtgttgaaaaattcaagaatttggcagtgaccttaaggccacagataggataatgaaaaatgaggcgatgagggcagtgtctaaaggaactactcttttgttctaacagaagctttgtgtgtgtgtggcttaagcaagtggttcaatagaatttctttgaaacagaaacaaaaatgctaagagctggttacaagtactctggtcttcttttctccttaaaatgcaggaagaatttttacctcttctcatgaatcttgtctgctgaaatgtctcagtcttcatgttatgtttaccaaggccaggccagaggatctgataatttataaccattcctattgggttttatgtaataactttggaactcatataaagtaatgatccacaaactcttttaatgttcattataaaatatgaaatatttctcagaaccattgcaattatgtgaccagacataactgtttcacacatgagtaaatacagggaggtttaacataactttattatcttgctgtcttttcttctcattgatgtgataatactgttttaatatttttctaaagaaaagttaagtaattttagaatctctactgaggcccgctttattggcttttgtaatagaactctcaaatctaattgtatttatgctcagactgacaccactaaatgtcgtgaatggaagggaaatgccccccaaagctgtgtattctgtaattatcgatagatgtgtctctgctgacgaggcctggggatctggggagagtcacgcaagtaaagctgagatggcagcaggcatttccaccgtcatcctgaggcccccatggatgcagagaggtgcttttctaaggagtgaatgagccccgtcattctgtaggactcaccaggaaacttttccccctttactgtgtgtgctgtgtctgcctctcctgggtctggagtcagtagcatgcaacttctagtttcgtagaaggctgatctccgaagggaattttcctgggcttcctgtcctagtgatctgagctgagtggcattgttccggttgcttgaccttcacctggggcgtgggcttggggtcatccctggtggctgtaaagtctcctgcagcgatggaagccagagagggattattctggaaacccacttcttactccccgtgtgggcagtggaagctgtaacaccaaggcggggaacccagtgacagtgctgcatccactctcgatgccccgtcagaatccaggatcctcccaggaccgaatggcggctatttctagcctagtaaggttgggtggaaaagattaaacatgagggaaggtgccgttatctgggcatttccaagtcctggagaggagagagggtttcaccatgcttgactcttttatcttacttgtttttagacaagtgtttctcaaagtctcatgtgcaaccagatccccatggatcttgctatgatgcagattctgactcagtagttctggggaggaccctctatcctgcccttcagctccagggtcatggctgtgctgctgatccagagaccacacattagatctgggtgtagcatctgtcttctcactgcacatctgctttcggggagacaagcagacacagggcatggaaggttaggtggggccctctgagaggcctatgagtgcaatgaaacttgaagagtggcctgatggctggagccagctcacagttgggttttgtttgacttgtccgatattacacttttgctttcaattggttgcacacagtttaaaaatgaaagattttttaaatttacaaatccaggctttcaggttctcttgaaaaactagaatgtctgggacaagagatagaagagaggtgggatccgctcccttaggagcagaggatggaagagaggtgggagccactcccttaggagcaggggacggaagagaggtgggagccgctcccttaggagcaggtgatggaagagaggtgggagtcacttccttagggaggtgtggctcttcccttctccgccaaggggtcccgcccagcctgccttgctcataacacaagagtttgcagacagggaagttagaccccaggaaaagagggtcacttccctggcacacacagggcatgtgcaatggtggaggctgcgtgcccccctgctgctggctcttgtctggagtttgctggaatggagaactcttgccccatcagaacccaggactcacctgcgtgctttagctctgccttctggcaagtgccatcttcctctttgaggagctgttccttagctctctagttctcacaagcaagccactagagagggtgcaattcccagctaattaaaggtcttgagatcctcccctccctgtcgccgacgctcctttgaaacaagcgggctgcataagaagtctccctggctgctacctggcagcaggtgtgagccaagggctggtgcccaggctgcgtggggcccagtggggagggagcctgaccttcacctaggtacatccaacaggtgtgaccgcccggcatagtaatcacccagttcctaggtgggcagtattggggatcatcacaaaatctggaatgttcattagtgcatgaaatcatctgatcatcttcccacttggccctcttcactcctcaccaccccccttattcacccctcaccaccccccttattcaccccatccccagtctctcctggaaactggtgggttgcattggagtcagatgtggcaaaacacagcctaagtcaacattcgtggttcctaaagcgaaagaactgtggaatgcttgtattcaaagatttctccatgactgcacctggttgagtgatgaaataaaggtgaaaccaaaaagacctttctgcttccctgggcggtggctatctaggtctttagttcttttaaccgggcgattgttgctgtaatgggtctcagtgctactggggcactgactgaggcttgttttttttctccatgaagaccaggaacccagtgccctggaaggctggtggcttaggtaaatttgagggctgggcttgagccaggctctgctgagctctacacttcagctgtgtctgccacccaccccccacacacccccccatgctgggcaaagccaccgtgcttacagcgttgactttctttatccccaagcagcattcagggctaacttttcagaaatttttatttctgaatgctggttaaaggcaggatcttctgctgccaaatttctcaagctgtcacctgcacagtgaacaagtgaggagtggcctgaggcacctggctgtgctcctacaacgaagcactctgttcttagggactttagtactgggtacatctagggagttaggaggactcacaggacactcagattgacagctctcagcatttggctgctggttaaataaatctcacatgagttaaaatttctacatgttctcccatttacaagacagagtaaaatcagcacttaatgggtcttgtagagtattgcaatgacagactgcataggggtagccgggtgactgcaagagcttcctgctctcttcatcatcttctcagagagctttgctcatttctgtttttgaatgtgaataaaagaatctattacatattacattcagagaaaatggtacgtggtacccaattgtggccacatgcaaggggaatgccatactgagaacccagcatgctgattggtatagggagctggaagtcattgaatggggaagggctggaagaaactgagggtgaactcagccctcacttcaaaggagtttgccgtcaactcagagaaatggagctaaaccatgcaagctgcattgctacccaagacatgggtgggaagggaatgaggttggggaatagggcagaattgagctgggcctgcaaagatggggagggtttggctaaaacctaggattttacagatttatccaagggaggaatctagcaatgatctccttttgctctttagtgtcttttcctctggccggttaaaattccctgttcatgttggcttggtggcttacacctgtaatcccagtgctttgggaggctgaggtgggaggatcacttgagcctaggagttcgagactagcctgggcaacataatgggaccctgtctctacagaaaatgtaaaaattagctgtgcgtaatggtgcacacctgtagtcccagctacctgggaggctgcagttggaggatcacttgagcccaggagtttgaggctgcagtgagctgggattgcaccattgcactccagccttggcaacagagcaagaccgtgtttcataaaaaaaaaaaccaacaaacccactttcattgacatctgcatgtatttgagagggctcaaaaatgaggcaagtttttgcttctgcagcaagatggagttctagagtcctggagaccttctccttggttcctctccagtgctgtccttggtgttactcaaaggaacaattgcctggtcttctgaattgggaactacttagaatataacagctgtgctttatatgatgaatttaattcttttctaatgaattttatcagactgctttttggagcacatactggaatatggcagtgccggaccattttccatcataagaaaataaattaacttaggattgtgaaatcacattaaaacaatatgaaaactctgccatgcttttggttatccccttggctggagcacgttgcaccatctctaccctgctggaaacgcgctgtcactctgtctccctgtgccctgtgcaacgatgctcatggaactgttggctgtcaatgttgttgtgtgtacaaccggagcagtgaggttagttcctctgcagcacactctccagagagtcaaaggatgtcattcccttctcggcagggacgcaatcatacatctgctctctggtctgtgacacctcactgtctactttggctgtgtccctgggcagcaatgcctgtcatcattttatgaggcacaacagaaagcctggttcactcctgacactgcgggacaggcaaggccaccaagccagtgtcattaggtgcccctggacttggagggcctcattctgatgtttctgctctgcacggggtcagtctgaaccatggaaatcgcaggggagatgcgagggctgggagcatggcctgattggaaattgagaacctgctttgaaggcctttctttcctttagttatctccttcacaaagcctcctcccggagttaattcacaggcactcatggccggcccttttgcagggacactagaaagaatcagcagggtaaatatttcatccgaaaccacagagatgctggcattgctggtgtgaaaagtgtagaaagaatacactcaaactatgtccctgcgttttcccagtggtatgtcttgaccacatgtagccagctggaccctccaatccaggagcaccttagaaagtcagatgcatctaacagactgggggagagctctggagagggtgctatgtgggtttaagctggaacgtgatgtcctgtaagtcaccaaaactgcctcagctttagtattctctgtgtaatgactatgaaaatagaatctacctcaaatagttaatcactctacagacttggagagtccacaggcaacgaggcttcagggagatcactgagaaagcagcaatgtccaagaggcggccgccagcagaccctgtgctaaagccacctctcctgtggcagctaggagaccagactctctcggtattcctgccactgctccgacaacgtcttgatctttcctactgaccctctctcccttctttgctcttctggccctccttggggctcagccccgcttctctttctcttccccctgcactctcttcctggaaggactcatccttccttgcagatttcatgcctctcttctgctgatgattcaaacaggcacttgcaactctcttatcttctccagaatttcttctctgatgttctctttgacttctccactttgacatctaacaacctcaaacctcaaaacttgcagttatccttgatttctcctctctctccagtccaccagaaagacctgttaattccatctcaaaaagaaatcaatccagaatccttcttcccttccatctgcaccctgaggaatgggtgtcatctcttacctggattatgccaaactgatctaacagaccttacccaaacgtttttacacgcttcagctagaaggaacttctggaaatgtaaatcagaccatatatcctcttgtttaatacccttcaatggctttccattccccccccccttttttttccttcagatcgtgtctcgctgtatcacccaggctggagtgcagtggcgcaatctcggctcactgcaacctctgcctcccaggttcaagcgattctcctgcctcaccttctgagcagctgggactacaagtgtgcatcaccatgcctggctaatttttgtatttttagtagagacagggattcatcatattggccagactagtcttgaagttctgacttcaagtgatctgcccactttggcctcccaaagtgctgggattacaggtgtgagcaaccgtgcctggcctttctgttcccgcttgattaaaacccaagctcccctcagccacaatgcccagagtgatcaggtcattgcccaaccttcaagctcatctctcaagctctgctccaacccacagatcttctctccgatctttaaatcggtatcccagctctttgctgacacctcagggtctttgaatatactgttctcaatgcctggaatgaatgacaacctctctctgtcacacacacacacacacacacgcatacacctggctttgcctggccaactttttctcattctttgatgatttcttaccttccactcaaaaatggctattcctctgttattccctctgtgggtcccattttaacttcttagcagttattaaaaattatgtgtgtttgacttcttcctctttttttttctggtctgactctcccaccgaattgaaaactctaaccagtcagaaaccatatctgtcttgttcacagcttagtccccttcacggactacagtgaccagcccagagaagagaagaggttcagcacatatttcttgaatgcgtacataagaaaatatacagagacataaacttgctaacatttggcctagttgttaggtacataagtaaacattcatttttactcctgtttaaaataggtttcttgtatctgggcagtttgtcagctctcaggtgggtccattagggatgttgaagttttgctgtcaggaaatctgattttaccgtttgggtggggatttctcagagattcttgaactctttggcaaagctggtggtgatgcagtgtattagtccattcttgcactgctataaaggaatacctgagactgggtaatttataaagaaaagaggtttatttggctcacagttctgcagactgtacaggaagcatggctggggaggcctcaagaaacttagtcatggtggaaggtgaaggggaagcaggcacatgcttcttacatggccagggcaggaggaaaggagggaggtgggaggtgccacacacatttaaacaaccagatctcgtgagcactcactcttgtcatgacaagaccaaggaagatggtgttaaaccactagaaaccacccccatgatccaatcactcccaccaggtcccacctccatcactggggattacaatttgtattagtctgttttcaagctacagataaagacatacccaagactgggtaatttataaagaaaaagaggtttaaaggactcacagttccacatggctggggaggcctcacaaacatggtggaaggtggaaagcacgtctgcatggcagcaggcaagagtagaagtgccagcaggggaaatgccagaagcttataaaaccatcagatcttgtgagaactcactcactataaagagaacagtatgggggaaacagcccccatgatacaattatctccacctggctccaccagattattacaatttgaggtgaaatttgggtggggacacagccaaaccatgtcactatttgacatgagatttgggtggggacacagatccaaccatatcatgtgtgcaaagtatggcctatagagtgagcacttggactcacctttctgcagagtctgattatgttcagtctttgctcctaccctgtttgacacaagggtgtgtgtgtgtgtgtgtgtgtgtgtgtgtttgtatgtgtttatcctcttcaatagatatcaatgatttcataaagccccatctatacctcctttgaaaaagccacagataacttgtctaagggatttgttcacaaatgatagtgacaggctggtcactttgcctattcgtggagaaacaattgttgttttcttgtctctggagacctgcagatctggttatttttgaagataaaccaggcagaaggaaggaaaacccacatgatggtaatccttcaacagccatggcagtgtgcagtttcagcacccaggctctctttacaaaaacgactgagtgtcagagcacacacctttccgagagacgttgtttgactatttcacctaagagctgtcacaaagaagccatctctgatgttgggaaatgctgttgacacccctggttctacatggatccctctccaccctgtcatctctttggcagcgtggaaataaaaatatatgtatcatttcatttccggggactctgctgttaaaatatataaatgaaagaaattgacttcaggccccaaaataaatatataacacagtaagaactgataaactaataaatatctatcaccgttatatttcatgatttcccaaagatatctgaagagcacttaattgttactgagtaatcaattattcaattaaccttcttctcattgaatatatatttgatacaactttttgaagcttcagctttaaaaggttcctatcgattgcaagtttcaaggccatatggcctgagtattggatttgtgccgtcatgattgacagtagcggctagtaatcacatgcaactatttcagatggtgtgagtttcagtgaggaggtcacaatggtgatgttcattttatagataaatatatttatgtgcatgtgtgtacatatacatacacaaaatctctgcctcatacatgctccgcagcagccttctgcatttacacatggcgcctgtttcgttttgtgcaaacattgaccaaatacaggccccactccagacgtgagcccagtgttccgaagagtaactgcatcatctcagaggccacccgatgattccgtgatcggaattttggaagtcttctatttaaacaagataagagaccagcaatgctctcaaattcaaaaattaaattgcatgaggcttggagttgcaagttgaaaaaaaatcatttcaattcaaaggaaatcttttctgctctgctttgctctggtttacttctctagactcttcttaggcaaccttgggtgtgtaagagactacattgactgactctcttaatttaatctttcttctgatgacagatttttgggtgagtgtgcagaattgaatagtggtcatgatatccttgtgtgatataagtcagcagatgcaatgcaatgttcaagaactctttgtggtgtcctgcaaaggaaaaggctggtataatggatttgtaacacatccctagaaatatgtagtcctgtgaacactgtgttattaatataaataggtgcaagcttttgggggggccaaataaaaaataagtatcaaataggtataaaatgtgtgttccctctcacccagcaattctacttattggaagtttttccaaagaaaattatctgacatgtcggggaaagactttcgcataaggatattaatcaacacatcctttataatgaggggaaacttagaaaacaactgacaagcccaagaataggggtgaagctaaattaggcacttccacatgaagaaacaccatgtagctataaaattatattgcagaggaataattaatgacagggagaaatattgaccttacctataacatttagtgaaaggctgtatttgaagcatacattgtataaaaacattagatagttatggctggaaaaaatatttggagtgaatttacattcagaatggccagtggtttttttctagatatggagatggtgggagatcattctttgttctttgtgcttttcgttattttccaaatattctatgtgtttgaataaccatcccctgacgaccttgaaattaacataacttaatagctcaaagcttaaattatttgatgcacccaactttcccaaaaatagcacgtgattgtggagtccctccgatgccatctcctgccctgtcctctcttaattctgcctcccggctcccggatggagacaatgctgagctgtgggtgctgggatgggccccccagaagacggtcataatcaagatattagcaaagactttctgtcctgaaaaatgccgtaaacagactcggtttgacctccttaatgcaggagcactttagtaatctgtgcctaatgattttttacattaagtcccagcttgtgttgggcccttgtgaggcacagtaatttaagaacagtcattttgcacattccgatctcattatgttacattgttactgaataaagactggtattatgttgctcccataaagggcagaagtggcctgaattttatctgctgaacgaatcaatctggattatgtcagttgaaaagaattgtggactgcagtctctcccgcagatggggggggatagttttttgttttttgattttttttttaatgtatctggttgttctgaatacatgaactacgataatacctggtggtgactgagtagtagtttttctctcttatttttcaatgaagagtgtaccaattatcatttcaacataacgtattaggagatcaattggaaactgaaagccatttccccatgttaatgctgtgttgtgtttaagctgccctgacggccggtcggggctgtgggaaaaggctgagcaaataatgaggaaagagcttagaaaatagacaagggtggggcttggcaggggatgtgaactattcatcaacaactcaacgaggatgatggaaataataagtcctccttaaagaaaaaagggaaaattttttctctttctctctttctttctttttctttttcgtttcttttttttttttttttttttttttaagaaatagtttcccctttggggaggaagaaaagcacatttaaccctaactttgtcctgcttctccatgagctgatttcaaacttcctgaaatcagccaatacttccctttgaaatggatagtgcaggtttaaacagtgggcattctttagcaatcagtttaagaaaacagtgtctaatttcctgtccattcctgcacatttcttagcacatggtagtgtcatttaatatctaagtacagtaatgctgtgctttaacttaagaaaatgcagacaaaccccctgagtgaaataatttgtgtgatctttgaactgaccatgaataaaatcaagcccttactatttgccctttatttatacagtggagaaaacctttgaaacccgaaactctgcaggatatggtatatgcatacagtatgtttcttaaaattatataactctgttgcattttataagtttccccaacttctccagccgccattatacgacgccttccaaatatttaccttagaaatgaatacgattttctaatattattgcattcaggagttgctaaatttccattcagcagacctaattccaccatctgtaaagttctagattttataatacttataagctgtttctaatctatttttactgccttgttctgtcctgaaatgtcaaagagtgcagaataggtcttggaattaacatgacagttaagaaacttggcaaggttttacagcagactgtgacattaacaaaatacaaaggagaatggtgaaattaacattaatgtatgcttgcagacactataaaaatctatatgtccatgatcgtggaattaaaaaataggcatgtttttaggatgatgctattaaagacagatctttactatgaaaggaaatttccatatgaaaagcaacttactaaaagtaatgccataatcccctctctggaatgaacaacaggtttaccgtcctaggtcaagtaggcatatggctgtctctggctgccaattttttttctaggcttctttaatctgtgataaaactgctttgaaagcactaatagcattttttcacagctgtgaaggagatcatatgatacatgtacctagaagggggatcatttgtttagattcacagattgaaaaaataaatcatttaagactcacttttaatttcatcatgggaagatttcaaatagtgctatctagaggaattcttgctgagttttctctctctctctctctctctctctctctctctctctctctctctctctctctctctccctctccctctctccctctctcagcagctgctagaaccagcctgtcctgtcctagttactccttggtgactgtagttgtgtaaactgtaataaccctgaccttgggctgatggacgctgatttaggaacctgcagtcctggcatttgaatcaggccaggctgctggagggcggggtggatggagcctgggactggctctgcaggctcagagcaacaggcactggtcagatcccagactgaggctccactcctgctgtctgggtgatcacaggccagttgcttaacttctctgaatctcaccggaaaatagaggaatcaaaaatacccacctacataggtgggatctgtgaaaggcatgtatgtctacaaagtccctggcacgtagtaccatttatgcgattgtttttgtttttaattggatagtggtgagaatcggggagggtggggatgggggaataaaatcctggcctttgaacacactctgctccctgtggagtcagtgtggctggcatcaaagagcgctttctgctatgaagatctctgatcccgcatgtactctggacccttcccggctgggagggctgagggctgatgtctgggctgccagcccagttctttagcccggcaacttttcacttcaccaccccagcctctgtttatcttcctataaataggtcacaatagtgcctcctagaggctccatgagagtaaagcgagttcttcaacaggaaacacttcaggcctggaaaataatatccagtaaaaaaattaaaagaaagtttaaaaatgcataagcagtggccaggcgccgtggctcatgcctgtaatcccagcactttgggagggcgaggcagatggatgacctgaggtcaggacttcgaaactggcctgagcaacatggtgaaaccctgactctactaaaactataaaattagccaggcatggtagcacatgcctgtaatcccagctactagggaggctgaagaaggagaatcgcttgaaccagggaggcagaggttgcagtaagccaggatggcaccattgcactctagcctgggcaacaagagtgaaactccatcaaaaaataattaataataatgataataataataataatccataagcagtaatgcgttgtttgaagagctgtcttgggggatgtttctatgttgctccctgcacacagcagactggggggatcagtggaggaagcttagctcagctcagttgagagatccatggccctgtgggctgaggagggcctgcctgggattgaagtttcacaggaaaatcacctttgctgcatttcctgaaagtggctcctgaagatcctggtcactcaaaggccatgtgactggcccaggagggtctggtgctgggtaaattctgtttcgaaaccatctggagatccttgcttctgccaaaaagacaccctttccatgtccattccaggctcgagggaacaagccaggtttcccttttgctggacaaagtgctcctagaaaacaggttaaggggatcagcagcagcgtggagagatttggggtttgggtatttggggggccctaggcagcaggcacagtcactaggggatcagaggactgagaggaaaggaggggtcactgtctggagacattgcacattctggtgcactgcatggacaggtgattcctggtgtgtctgggattcctgtggtggccccttttgggagactttatttgggatcctggggtccaggctggggcccctgcagccccaaagggctctgaggagggaccctcgatacatctcacctaggtacccatgaagatgggactacaccaagtttgttgctttagggttgatctagacagaaggtgcctatctgcagacatgccacagacatgcgtgtgcatgctcgcttgctgatcacggctcacctggtctcccaggaggttctgagcttaggcccagccctcccagcagcaggtgcactgcctcccagtctcccatcactcaggatgcttgagctgcttctcatctttgatgaggtggctcaggccctgctgctgggttccttctcacatcagaagctggccgggtccgacacgttccctcctgtccgctcttcttttctccctccctttccctgcctcctccctcccttccactccctcctctcttttctcccctctcctcccatcctctgctggggatcccggcaggcactggctgcactcacgtccttccaccagtagatggcggcctctgcacagaagtggaacccacatttctattactgtttaggctttgagagggggctttctgagcctcaaggtggggtgttctaggaacagctccgggctctgggggtagcagaatcctcagaagcccacacatggggtaaggcgggagctggaaacctcgcggatctagtttcccttgcctcagagctgggacccagaaataccttttaattgctttatttgttttctctgtgtgtatatatataatataaatatacacacaaaatatatatattcaaaaatatatatgtaaaatatatgtatgtgtatatatgtgtgtgtgtgtatatatatatatatatgtatgtatgtatgtatgcatattttaaaagacttattcacattgaaaatccaggatattttacagagcatatcaggcaatttctggaaaagtcagaagttgtggtaaccctgggctcatgtctcctgggccacaggggaaggtgctgagtatcgcctgacccttggggcagctgttctcaggcctaccttggtgtaagctcttgccctacccaattttcccaggaatgcaaactgtgctgtaagctgggccctcttgtctaaactaacctcgttagcatctcgcagtagcacagcaccgaggactaatgactgaacacatgctgtgtgctgtagacctcccgagcaccaggtactgtctccatctgaattcatttacacgcctgaacaggtgtaattatccccagcttacagaaggggaaactgaggctcagaggagcaatcgcctgtcccagtagcagaacaggggtgacttgcacacaggcttgcctggtggaaaagctgggttagtgcctggttggcccttgggtgcagggagggggcacctgcaccctcccacgctatcagcctctccctctgtgtgcgttagctgctttctgtgtccatccgggaggcctcccccatgccgaagctgcctgtgagtgggaaggtgggtggttaggagacctgaaatgccgaagtgtccccaatggcctggatcaaggttaattgaagggactgaccatgactgtgtataaaacaatgtcagaagactctctcagctagagttttttctagctttttttttttttttaattaatgagaagtgaggtaatctcaccttttcagattcccagagtaaatgaagacctacctgctctggaagcccagagcatgtcaggttgtcttggatatagagtacatgaacagctcccagcctatttactacagtactagataacaatagcagagcagtagtgttagtatacactcagcatgtcctgagtgcttgcaatgtgctaagaactatgctgtgaaggtcaaaccctataaggtatacattgttattagcctcatttcatcgatggggaaacgcaggctcagagaggttaagtaacttgtctaaggtcacacagctggtaattggcagggctagatttgaagccaggtcctcagggcactatcctttcaaggaattctatcgaaatggcatgtaattggctctaaaataactggagtgcccttcagaagtgctaactgctccaagttatctggattcttcttggatgttaaatgtaatattagaaaaaaaatttttagttcatgatgatggtcttggccacattttctctctctccaggaaataaatttttgcaaaattaagatatttatttgccctggagactctacaccatgtagagattccacagtgggggctcctgaccttgagtttgaggggagggggtgtgattgactttcttttgcttgctaggacaggtcctgcatccctgggccaatcaggggccccttctagaattttctgcctaatacactgctaaccctgtcccaggccaggctacagttgcttcctggtgtgtctgagtttttgtgtgggggcgccttctgggagcttaaaagctcaggatcttggcggccaatttgagggtccctgcagtcccaaaggacactgaggagggacccttgttatgcctctcccaggtacccgtgaagatggagccaccaaagtttgttaccttagagttgacccagatctgtggtgaggggaagtcggctccagcctctgcgctgcctctctctgctgatggctccctgggggctcggtgtaggtctcctctataaggcgggtcatatttgccacacccacttcgaggccatgtgaaggggccgcgtgggaggtgcccagttcttggctggtggaaaagtcgtttgttgctgtgatcacaggagctcccaactcattccaccttctctaagccagctccgattcctgaggaccacctgtgtgcccaagcctggttggggcgtttctggttaattaggaaagggatcccataccccaaatgcccagaagaaggagccagaggtttagaagggccaggccacggaggagcagctcagcgagggtggtctctgagtgggcagcgggggcaagggttgtcgggggaccccctcacacgcctgggtgcattgtgctcatggtggcccctgcccctggaactatgaatgtggcagtcctggaggcttcctagagcccagctagatcattcctggagggaaggggacagcaggagcaattgtcccaatgccacagtggggcgatgcacaggcggctggcgctccctgtctgtttttggagaggaaatgacacgacctgcagctgggtagactgcctcttgtctggtcgggtctcctccatttctgttcctcacgcgcttccctaaactgggcatctggcaggctcagccgggcagacgtgttccaaggaccactggcatttgtgatggctgagtcctgtgcctgcgggaggggcggcccccatccctcacacactccctttaggcggtgcctggccgtggtcagcttccccggggactcagcctcggtgtccagcctgatgaagaaagaagggacaggctcctggagagtaggggactgccaggccacttccgcaggcaggcggaggggtcccttggcctccctgtcctcagccccggagaatcccactctcctgctgcggggacctgaacttcgggaatcccgagatggccgcaagagggcgcccgatcctcgcagaaggacaaggctccactttccctaaaacctgaaagaagcttgcaggggggctgcgtggggtagagggcaccaactgacaaacacccaattttgctgtctctcagggtgttcggagcaagtatggaaataaaaactgttcctattgttggaaaaaattaaaggagaaaagacctcaggttaaccgctttgttcaatgacgtattcattgtggcaatgtgcacgaatagagcgtctgctgagtgctaggctggaggagttctatgaactagggcggactggattgttcctgcttctacaggagggaagagaacgaagtgggcaaaagagctgagcccagagtcacacagactcacgcctgcatctgcctctctccaaagcagcttttccctttcccctcatcctgcccaggtgggagagggcgggcccgggactcacgggcttcttagcctctggcgcagcatggcgtcttgtggctaggtgccagaagctggcggaaggaggggtacgtgggaggcttagtgcaatgggggaacgaattcctgaggctcctctctcctccccatcccgcccatccctagggcccagcctcaggcttcctctgagactcctcccctcctgcgccgcttctcattcgcttagtgcactgggatcagcatgcctgagttcgaatcccgtcttttgccctcattcgctgagtggccttggaaaactgtggcattcatttgggctgggtgttctgcctgtgaaatccgtggtcacgatgactgcacctgtgtaggacgatcctatagatcagatgagaaaatccatgccaggaaggctgtctgtgggatgcccggcccatggcaagcacctactcaacacgggctgttaatatagtccttgtcatcgttgtcttctcggccttgccaggttggacactgagctcccccgcagacgggtctcggggaatgaactgttcactacgaagtccaaagagagtttcatttggttttgttgggggaggcatttcccaggctcttcctcgtggagtctgagaacagagacagaggccttccttccccagagacgcctttccggactggccccttggtgcctctgttgcccacgcccttcaggcaggttctgaaggcaggagccattcccgggtccatcccttcagcccgggagcctggctctctgctgtatccctgccaggctgtaacagcgagagcacagagaaggtactctgtccactctatcaaatggatgaatgattgcccatttcatggccaagaacattctgctgctctatccaggctcctctccccaccccattctgcccatccctagggcccagcctcaggcttcccctgagactcctcccctccccttctctttctcattcaatcattctttcattttcccgttcactcaatgcacgcacgtgcttctgcatgtgaggctcaccacaagccctagaggaacaaggatgaatgcatcattatcctatctgccagaggatcgccatggtgcaggcccacaggtacctagggggtataactcagcatgggtgttgcccttaggcaaatcatcaatgacccatgttcaggcttgacattggggaaggggtcatgtgtccagtctgaaatctggaggaaattgttaggtgcccgtgacatagttgggggcttcccagccaaaggagtagcatgtgatgatcactggaaaggttggcccagccggggagctgaagggtctgtcctagagcaaatgcagagggtgtggaagcagtgaccagggacaggcctggagagagactgtggccaggtcacggaggccttgtcaactcagcagagatgatggcggcttcatccaagtgactctggggcttcaggggtgcagagcaggaagaactgagggagaaggagaaggggaagcggggcaggggtggaggccccaggtgctgagagggcacagcctcactggagggaggtggctcttcctcagtgaccagaggtgaggaggaggcgggcagtctgcagtgacatggggatatgtctaactagtgtttatagcacctgcgctatctcaggaagcactaggtataaatagatactcagcagacatttgttcagtgacgaacaaacagcctcaacttgggtggttgcaatttcaaaatgcattcttccgaccctgggaggctgccaagatccttgcttggcaagatccctgagaatgtccttctagtcctggtacagctggaaggatctctgggagggtctgtggccattggacttgaggcatcaagacaggcccatcatctacccaggagttcttttctcagtaggactttacggagcgtggtcaccgccctgggacccggcccactcagccaaggctatgtcactcactggggccgtccaggccttcacttgggtcacccgattcccatctcaacgtttctttttccttgctataatattttattcaaaacaagatagattacttggccagagaaactgaacccagacagacagaaaatagcttccccttttattctgcaattcagaacttcttacaaatgatctgccagttggggtgccccatcccctggaggagtctgtgtgtgcagaggggccataattgtgctgatgttatagagacttaagtgaccaccccagggctgccgttgctcaggtgtgtttctggcattcccaagttggtacccttacatgcaatattttacattagaatgcatgcgtttgaaatagcgaattggtgaacatgtaaaccagatgctaagagggctttgagagctagcctgggcacccaattacaaaaggggcattatttccacagcaaagcatatttcagggtccatacagcaaacaaggtcaaatctgaaagatggggtctgcaaacctccatcttctttgtagtgatgttttaatcccattcctctccaatcctagctcaagaatctgttagtaagagcatgggggagaatgatgagaagcctggtttaaaaaacaaacacatcaaattctctgctaccacttatgagttctgtgactttagtcctttgcttggaatcttccagaatcataccctaagataaggatttaggcacaggcagttttttgggaggagggagagaagatcccaggaagtacaaggagggagtggggggagcagatgtaggcgtgttttgaagcaggtgatccctgtgggaaatggagtcttattcctgctgggaccctccgaggaactatgtggacaacctcaagaaagctgcggtgtttataagccagcccctatcctgtcttggttgagtgtattcctggggtgttcaccctttggccctttaatccaataagagcccatgactggagaacccccttggccagaaagccccatatgctttggcatatgtggaaacagcctgcaggagatggcccaggggaatgggtgaggactccagtgcccctgtcacatgagaatcgagcctctccgagcctccgtttcctcatctgcactgtcagctgttccagcccgcctaggacccttccagggtgatctgtatgatctgtgtgacctatgagacatgaaatagtgacagatctgagcagaagccaagcacagcgcctggcccttcaggggcacacatgacatcactgttgtttcatcacttttctgcttggtcttcctctgcctagattccaatatgaattttttcagttcatcttcaaatctctgctctcctctccctgggggaaatcttcattgctccacgctggggtcctgaacccactgaaaacattctctctgtgtctgagaagctgactcagattttccttttgtagacgggtctcccgccctgtgcctgccacgggactggcacatacatcgcccgcacagcaccatggccctggccacccaggcacatcttaaataaaagcaatagtaaaagagtcaagccaaccagccacagccacccttttctcctcctgtggctgaagcctgcagtgcccctaagcctgctatctcgtcacctcttcctgcctctggggcacacatcccaacctaactctcacatgcgtgcccaccaccccaaaccgtgcacggacgcacgtcccgatgtcaggttccccatgtttataggtaaaatattactggtgaccgacacacagcctttttctcctacgttgtcattttatgttaattgaatgctagtgttaatctaatagagtttagatttatgttgggttctgtagcgagtcatattttaatcaatacacattccaacatttagatggacagatgagaaaagcagcttcatctccgcacttgggttccatcagctgtcaataattccccatttgaatccttcagatggtcagatttatgggtttgagtatattgcattcatcacagaaattaacttttggtggaactgatgtgaaagctcacatcacatctccaagaggcagatattgtgtttcagagctgaggcactcggaaatattatctgagaggagcaggttggcggggtgacagcaggagatgggataggggcctgggtggagaaggctttcagggcacagtgctccttaaggcacgtaggcatcactctgtgtcccgtaagcagagctagggctggttctgggcatcctgtgccatgcaccctgtgcccaggctgcccggggatggagagggagtggttgcatagagtcaggtgaaagaggatgctgttcctgccaggtaaaagactgaaagactcttctcttgtggaccttggctggtcctactctcaggttaatttctcaggaagcagagccagagttaagaaatcagggcatccaggtttacttgacatgtgactgatggagtattgggaagggaaggaaaccaatggagtgtatgccctcaatccaggtgggcagttggagttttggggagctctgggacctgaagagcactcctcagagtgaccccacctgagaggtgaggaagctgcctttgtctggtaaattgctgcccatcgtgggtggaggccagcttgagctctaaatatgaactcggaggcactttcagcttgtccagcttgcctctgtagctgggatgtcaataaaagcctcctgtatagtgtgttcttggttggtattcgaggtaggcagctttttgcatttagagatgggagtcaagtagacagggcaggacatgctcagagatggtccttccagccatccccctgtggtcagggagaatgacaccctgctgcttgaacaggtcacgtgggcatcgggctgggctccactgcttacctgcccgccttgtcaaaatcccttccccctgagaaactcctgcagctgaaggtggctgagaggctctgtttccacaactcccaagagacacagataacagtgcagtgctccacgaggctcagtttctctctctggcctcatgttctctggctttcattcctgtagctatctataggacagtgcttattgatcttggaatccgtttgccgcacctctaaggaactggatatgccatttaggctttgggggccattagacacttccacagagatttgtatcagaagtagcaaccactcgtctctgtttctgccatgtaaacaggcaaatggatttgcccttgagtttgctgatgcaagcgttcaaagtgcaatgagcccagagcttctacctgatggacccctcaaaggtgtccgttgctctatggccagtgagcagagacaggtgagaaaggacgctgttcctaacaggtgaaagactgaaagactcttctcctgtggacctcggctggtcctactctcagggcaacttttcaggaagcagaaccagagtttagaaatcaggtcattcaggtttatttgagatgtaacccatggcttatcacgaaaggaaggaaaccaagaaagtgtggattggagaaggagctgggaaggctcacagctgcatgccttgaaatctcatcttgagatgtctgtttctgctttatttccagaggcaaaggtaatgagtgcgcccactctgatttctctgtctcctggcgcccagaaaaaagaggagacattccttgactttccagtctagctattctttcttcagaggagacaaaaagatggctatagagatgacagccctctcagtttctctccatgaaatgagtgatcaagagtgaggtctcatggaaatgcactcttgcttttttattttttatttttgacacagggtctcactctgttgcctaggctggagtgcagttgtgtgatcatagctcactgcagcctcgacctcctaggctcaagtgatcctcccacttcagcctcttacatagcagggactataggcatgagccactacatcaggctaattttttaattttttttaatagagatggggtctctctgtgttgcccaggctggtcttgaactcccggggtcaagagatcctcccttctcccaaagtattgggattacaggtgtgagccacatgtgctgggccagaaatgcacttttgtttttaaacttcaaacactttgggaaattcattgactcttcatgtctttgcatgcagtttattctgggtgctcatgggaaatgatttccttgcctctactgtgagcaagatgaacatgaacctttgtgcataaaacctgaactgtgcccattgagagtctatggccatctgtgaatgtgtaaagaagatggctttcactctgtgagccccttgtcaacattgtaggacaggaagtcacatgcctccatcataggtctgcctcgtgatcacagcattatttgagaacatatctgtatttgcaaaaatccattataactcccttgttgttggggatgcagttaataagtgaaggtaacacaaaatatgatttcaaatcagtttaataaaattattcatgtagattttaaatcatttttacagttgatttaacatttgtgactggtttatagattatgatataggatggtgtttgcatctttgcaattttattccaatttagaaacagtacaaatattaatttttgcttcaataatggagccttagagaattaaacttgtcttttctccacacacattttatgaaaatgattttaatatgattttaaatatatcttttgaggaacttcttgcagggaagccctttgaacagggacttaaatgggagtatcttctcaaaagtttcttttgagacaagggtggacattttatttattttttatggaaatggagtcttgctatgttgcccagcctggtctcaaactcctggcctcatgtgatcctcccacctcggcctcccaaagtgctgggataatagttgtgagccgacacacccagtcaaatattgagtttttaagatattttgcttgtgaaagaaatggcgtgatgccttttctacaattgaagaaagttctgaagcttctagatgtggcttcttaacaattatgagcccaaattaatgtataccttggctcatacctgctgggctgccgcaatctccctggggccaggccagctggatctgtgctgaaaccagacacctggctggtgctcgggagaggttttggcttcacaatcccagcctctgatggttttcttggttacctcaggattacctgcttctcggtttcttattggtgttatacttaagatctcaacagccaggtgaccatgtgcaggcattggagttggccctatcaatttggcctctgaaaggtgccctcctggctattgatgcatctgcagagggcagcacagtgacaaggacagggccctggccacccttggccatccacctggggctgtggccaaggcactttccagctcagcacagtgtgccttggcgaggacattcactgctctccatgcaggatcctggccctcaggcccagagcaaaatgtcccccggggacacaggaaaagctggcggcaggctgacctcttgggtcctgtctagctctgacccctgcatgctgcagatacagataactgcactgtttttgtgaattatatgtaattgtagagactgggataaccaatgactttgatcttttgcgatttttgtctttcctggcatcaagaaaccacttaaaagcctcctaagaccctgagctcataaagcccaagtgaggggtgctgcacgtggcctgccccctctgatttggggggacttggtgatccctgaatgggagtctctgcccaggaaaggaagggctgttagagaggggatggggtgaacgggaggcaccctgatgggcacaggtagcccccagctatcaccctgagccaccgaacttccttccttgggaggagaagaggcagggtttagagacttcttctggccacggttgagaatgtcaaaagcttgagtgttcggtgacagtttatatttaaaagcaaactatttcaagaggatttgggatgagaaattagactgcaaagggtccatgaaaaagcagcatcaagaaacaatcaacaacttgcaagagaagcaagggggtgctgtcttcagggaccggagaagcctccatggtaccacagctttcctcttcaaaaggctgggccgggttatggccgctggctgggagatgctcaggatgcgggacaggttaggggcactgtgtgcagggggattgctcagggtcctcagcaggggtcggagaggctcacggcctttctggtctcccttctgagcctggatatcggtgagaggctccaggagccgagtgcagagccgatccagcccagcctgtgactctggccacaggcagagacctgcacaagctctggcttccctccctccccatcgcccactgtccttcttcaccatcttctctcaggaagcagttacctgtcccagctcagttttcccttctgctcacagcatcttgacagacatggtgggaacccaagacaagagaaggcatgatattgctcttgaaactgcagatcccaggcagatcctggcactggactcctagagccaagcagggagccttgggagaaatcagactatgtctggagcttcctttagaattcctcggagctccttggtacccacccccaagcccccccacacacacctatacccttactgtttaggcttaacttttgctttttgccctctggaaataggtcagttaaatcttcattcaaaataaagagattaaggaggctgagacagaagggtcgcttgaggtcaggaggttgagactgccttgagccaagatagttcactccagcctgggtgacagagtgagactccatcctaaaaagaaatgaataaaataaaataaaagagtagcacgttgttacatagatgacaagtccccagtgaatagctgcaggatccctgcagcccccttcaacaccgagccagccgagacatgagtagattctctcagtggcaacaggtgatttttcttctgtgcagaagacaggggtgaacgggctgcccatccttaaattctgaggccacacagctgcatggaggtcggttcaatacaggctcaggacttcccatatccaggcaccagcccgattttttatttttgaaagttaatccatctgtgcggtggattatcaatagctgctttcccttaaccaccgcttcacagctatctgggatcagagagcaattttggagcccgcagctagatgatggaggtgaggccctgggccgggaaggaagggaaaggagacgcggcagctgagtctttcttggctgcagcagaaacaaggtggctgggggtggcgctcaggaaaccctagggtgtgaggctttagctgctggtgccaggagtaaagcccaccgggctgcctgccagggcctgagggtgcagggctctgtgcagctgtcccctcccctccacgaactgccccctccccacgacttctgggaaacgtcacctctttacatccaggaggcagagcccttggtgtggggcagcagggaagggccagatcctactgtggctgcaggacaacccagcaggaaggtcaaaggcaggtgcgtgtcggctcccggcagtctgcagacttgcttggctgggtcccccagagcctctgagggtctggaattggtagttaacatttaaaactcaagggatttcacataaaaacctgtttctggcttctctggaaaattgagagaaattgcaattctcaacctgttttgcggggagaggggggtcagctctgggcatccagcccacctggcccacatcgggaactggagttacttgccagatgcacaggtgaacgagtttcctgccacctggtcatccatgctgtctttacccagggcctctgtctccactgtacgccctgggaaaaacccaggccaggggagggagggaggggtaagggacactggacaaggttggggtgtgtgctgtgcccaaagaggggtcaggctgagtgggaaaaagactcctgggtctggaggccggagatgacaatcctgcctcctctctgtcacaccggggacaagaaatggggaggcaggggccccatgcacagaccctgctgttccttatctgttctgcaactgtcgtttatgattattatttttattttattttattttattttattattattatactttaagttttagggtacatgtgcacaatgtgcaggttagttacatatgtatatatgtgccatgttggtgtgctgcacccattaactcgtcatttagcattaggtatatctcctaaagctatccctcccccctccccccaccccacaacagtccccagaatgtgatgttccccttcctgtgtccatgtgttctcattgttcaattcccacctatgagtgagaatatgcggtgtttggttttttgttcttgcgatagcttactgagaatgatgatttccaatttcatccatgtccctacaaaggacatgaactcatcattttctgtggctgcatagtattccatgatgtatatgtgccacattttcttaatccagtctatcattgttggacatttgggttggttccaagtctttgttattgtgaatagtgccgcaataaacatacatgtgtatgtgtctttatagcagcatgatttatagtcctttgggtatatacccagtaatgggatggctgggtcaaatggtatttctagttctagatccctgaggaatcgccacactgacttccacaatggctgaactagtttacagtcccaccaacagtgtaaaagtgttcctatttctccacatcctctccagcacctgttgtttcctgactttttaatgatcaccattctaactggtgtgagatggtatctcattgtggttttgatctgcatttctctgatggccagtgatggtgagcattttttcatgtcgttatggaacatctgcctgccaggtgtaccctgcaccccgcccctttctattccccaactttcactacagcccctttccgactttccgaaccccaggggcaaccacacttgatctgggatgaatggctctgtatcctccatggatatggaaagtctgttttaaggaatgagacccgtggagtgggcaggagggtcactgcttagtttgccctgcagcacaggaacccacaagggtcctgactcctggggctttctgcagacctgagcgccaggcctgtgcaaggtgctgaggaggtgtgctaagtttgagtcaacaggcagctgtgcactcctgctggagccagtgtgggagatgttgtggactgaggggcatcacagggggcttcctggaggaggaagcctgtgagctggcggggagtggggtaggaaataggggcgtgcccagcagaaagtgcagcttaagagctctccgcatgaagcgcaggaagtctttccctggtgtccctggcctgctttagctggggcaccagccaagaagctggatggagtcctaagggcccctcctcctagcacttagggcagctctctgcccagcagatactggtggcgttgatcctttctctcctattgtcataatttggattctaggaagccacgctgcagactggtttaccaggcgggaggctggtgccgagcagcctcatttgatgggtcctaattacttaggagcagaagtggctccagtcctccaggtccagttccaccctctggtctctgggtagccccccttccccaatgacatctccgccacgctggagagaacagcccctctggaatccgcaatggtgtcagcccagccaacgtgggctccaacagacgttaattgtgtccctggaggaggcttccctgaagttggggtcactccactgtgtcttccgtaagcgatttgtgcataatcgacagtgcaaatgggaaggaaaaaagggagggcagtcccagcttagcagggtagggggacaagagaaagaggcctgtattgcctttatggcccaggaaggagaacaacgagggaggggcttgcggaccaccaggggccaaaaagctgcatcttcaaatctccaaaccaaggagctcactgggttctgacccagccaggcaaggggatgaaatcttaatggtatctctcgaactctgcaagttttgggtttgcatacagcctgtcctcagtaacccccaagatgaagctgctgcgtgctgaggactcgaggcgaggatgtgtttccccaagaaaggaggaatctataagagacatgatgagatgtaccgttcgaattggtttctctcccagaatatacatttgtgctggtcgcgcgtgcacacagcatacagtgtaattcacacacacgcacacaaatgcacgaccagccgcatcgagattcttggtagaggaccagctctcggatcaagctggcagaaggaggcaattcagatacgacacccctttctttggaagggtgccttccccacctccatccccagggaaaatctgccaaatgggcataatattaagtaacgttggcagggggcagctcacggtccctcctgacgctgcttcctggatctgcagagatggtgtcgttgctttcctgccctccctctctgcctcccctcagcccggaggggaaatgagggatgaagaacggggtggtggcaccctctctcccccaacaccctccatccaggcagcacctctggccccggaggtgccctctccccgggagtggaaagaatcacccgtctctttttggcaccagcaccctcctgaatgccatgagaagctggtgaccttcactctggtctccatgacgacaagatggtatatgtttaattagttcaggcttattttaggaccaattttcttttattttagggcaatgcgagctatgataactgtaagcatgtttacgaggcgcgcgaggcttagctgaaatgtgccaacaattctagtcaaacagatggtgacccctgattcaacttgccctctcattcaattattcagctgtatttaattttcctccgagtgactcacgcgccgtgcctccggctgccctctaggtggcgcgaaagaccacctttatggctgcgaggcagggttgaaagccgggtctcggggaattttctcagcctggccttggctggagaagaggataatgaatttctgcatttgaacaatagtttctgcctaatatcaaatgatgtgaaagggtggaaaagaattgggtcaaattgtatgtgatttgaccatgagctctaagtaatctcctttctaataaaggaatttgaaagaccttccaggcttaatatcctcccaaataatttgtttggagttcaaggagtgttatggtgttagagctgtttctatgattgcggatatgttctgtttgcatttggaaaacctcttctgtttaatttttagtagctgccagcccacctcatctgggactaggaggataacctgagcggattttttttttttctctttttccctctgatggtttctgcctgccttctacgctgtcaaggcttagcagtatttgaaaactggatgtccctgtaaaggggaatgaaattgctcactaaatatcttttcaaagacatgacctttctaatgcaggaaccaaagaagcgtgtggccacacccataataacaacacattggatttctcagaacctttgggaaaggaaacagcctactcaactatcacccactccacttcatcccattctgtaacaccttagacaggaggggctgtaccttagacatgctcaactcacatttcttgtccatcaacatagctaggttaatcagagcaacatggaatcatacctttattcatcaatcagttaagaattcatgcctttagtattgctttttttgatacattaagacaagcttgtaaccgatcactcatatatttttctccaagaatatctctctttagaaatcttcttggaaaattatctatctttcctgtcctgcatttggtcaaaccacaagtaaaagaaccaagatcaacaatgactcacatgtacacacacacacacatatatacatatatatatttgagatggggtctcactctgtcacccaggctcgagtgcaatggtacaatctcggcttactgcaacccctgcctcctgggctcaagtgatcctcccacctcagcctcctgagtaactgggacgacagatgcatgccacaatgcctggctaatttttttgtgtttctggtggagatggggtttcactatgttgcccaggctggcctccaactcctgagctcaagtgatccgcccgccttggcctcccaaagtgctgggattacaggtttgagccaccgcgtcttggcctcacaaaaatcttaatgcataaactgcttctaaagacaacacgtcaactttccatggattcacggtccaggttttggtaaggaagttcactttacctgaaaactcttagttctcatttttgcttaagggcaaaatcatggcaatagaaaggttaaaaccatgtgcaccgatttgattcctggaactccatttttacaggcttggctttggtttgctttcctgctttatcttatccaccgatggcttggttcggtcattctgtgttagaggttctgcatgtaaaccagggaatctttggttcaggcaagggagggggctgttgcttcacagcatgactttataggggctgattgacgcagggggcgggacatgggcagcggtcgggacctgatcccgggctgaacagccaagggcccttaccaagcctccgagggcagatgcagttgcaccctatttatgtctgggacactcaaacttagcctactggggccacttatgttttcagtgcgtcttccagggggttatgtgggagggggttgtctcaattacagctactcaggccacgcaagtgaattgtacttaatacctctgccctctgattagcctaccagattggactcaacagcttcctcagatgatcagagcccccttatccttttggataactttgtgttggtggggggaggggtctttatcaaatcctttggaagaattgggtaaaacaccaaaggggtttgggtgtgtcccatctgagcccttggggtctctggattttctgctctgagggtgcgactgcacccctgtctcccatgcttcatcttccacagggatgcaatgacagtgagtagggggctttagaacaagtcctcgaggtagccccatctgagctgatggagagactctttctggatatctgtgggctcttacagcgggagtgtttttatttgtaggtgtggggtgtgtgtgtgtgcacagacacattcatagaaacaagccttcttgatgctttgcagggaaaccaaactctggtatccccatccagcttggctccttgcaaacagggcccatggaacccagggaggtagagacggaagggatggattgggaggaaaaagtcagggcagcttcaccagggaacacactctgtagccaagtcacgattttaaaaaaataaatgccataaaaatcatggcttctctggacctctggcttcaatatgggatttgtacatattacataatctgtcactatagtactgtatattaaagaaatggccccgtgcagaggcaaccagggggatgggggcaccgtcccagccgctgccgccgtcctcccctccatcatgggctgggacgctgtcagctccaccacctgccccacggtcctgccacgttgctgagatcccaagttactctgcctcctggaacgtcatttgtttttctttgttcggaagacaggctacatgagcatttgcgtgaggccatctgtatctctgcaaagaaataatggagcaaggtagaaaatgtctgggtggggaagaccccagtctgtggcaatggctgaagatggggcaggggccagagaaactttctccagggtgtgatgtctgaatccctgtgcccaggaaagggcctgcacaacttctttgccccttccctctctcacgttctcagcttctgcatttactccccacagctcctttccctccttgcagtcctcatttgcagagttctgtgaagatcattttgggagtgtgagctgtctctagccagctcattctgcagtagcagcgagcaccccccaactcccaggaatcaacccccaacacacacacacacttttttttttcttttgcaaagggccaactctgtttttttcctgaaggtggcagtgaaagaaaaaaaatgactcccttagaagagttaggaattttattacaaaccagatggagccgcgggcatccccgttgtgtgtcccccaccctgtgagtgtgtatgtgtgtgtgcacacccaggggcactgacaatggaagctgcagcccccccaagtggggctcacacagggcgcggtggcctcccctggcaccgtggcaccgtggcccagtggcccagtgccaagtggctgccgtgctcagccagcctgctcttcgtcctccctcttagtcccttaccaagataattgaggatataatggcggggaaggagcccgccggctcccgcgggctgtcaggtatctgcgcgcgtcttcatgtcatccgtcagcattgagctcctctgtcatctctcctcagccttcagcgtcgcacactctcatcgccttcattatctcggctcaggccagccctccccccactccccccatccagtaaatgcatctttgtgcaactctcagtctccgattatgaatcgatgatcatgtggtataagagagatagatggcttttagttccatcctgtctcccctaattgtaaaatattagttacattacactgtgtcttttgattaatggaacttatttggagtagcctatccgatccctcccccttctaaagtcctccactgacttttgagaattgagtgatttcacttaaagcagacaaataggcccttcagcgaggagatagcaagactgtgatactgtgggcaagacaggctgtacagacagagttgtgtattccaaagaaaggcttcagcccggccgggcagacgcggggctgcaaatgcatgcctgggccggggaacttccttcccttctttatttcatcctctttttggcaaatctagcccatcttgctgacttgcaaaacaggatgtgaaacaaaatttaattaaaattaaataaattgcagatttgctacattcccacatgtggctcatgagaaaccagtcaaatctgaactttgatgaattcgagctctcactctactgggctcccttcttagtgtacaggacggggcatcaaaggggcgttctgctgcccacgtccgacacagggagagatatttatctttaaagctgaatttattttacttggcactatttacttaaatatggtccgttgataaagtaagcccttcccatacaaaagggaagtcggtggctaaatctcttattataaataatcactatcagtgtaaactcaaggtcacgttcactttcaacctatgagctcaattaaaaaaggtctatttactgtcgatgtgtataatatctatatgtcagggaaacagggagacttcataaacaaatcaaattttcagcaaagaaaggcattgcagcttaggaatttcagcatgcattttgagggagcactttcaggcctcctgctgtataaaatacacacaaatatttatgtctattttatagaatatgcctagtatttcattctgacctttggatttttttaaaaaaaacttttatttgcatgattcttgaacacactgactattacgtattttctggggacatgctatttcacttaatgcactgggcaaaagattgattttattacgtgtagagaagctgcaaatgttttactttattttttaaaaaagagcataacaatgtgtttatgactgctaaaaaaaaaaaaaaaagggcaggcagcaaaacaaaccaagcctgagtttcaaattcattctgaggattaaacacccagaaaacacggagattagagattggagggctgagccccaccggttcagtccacctcccatctcctgcccagggctgtgcagggggcctcacaagtgtctggagaatcaacatccacatttgttctggattaataactcaggtgcccggatctctccttcccagcacctgagcctcgattttggaatttctgtatttcgttttcatgtgtgttttgagtccttgctttgaggagagtgtgtgcgtgaggactctttgttctgagtgtcaagggacttttgtaaatgtcagctgagtttcggctgctgtgtctaataaacctccttagggcttaagatgcactttctccaaattttcatcagcagcatcactcacttagttatctacatccatcatattttgagagtcttttatagaatattcttaatacagcgtgtgaatgcatattgacaattgttggcacttttatatattccgcgatacacatttatctgttatggatccataatatcaaatgtgtagtaaaaagctatatcaaaaggcagttatcccacatgcataaaacactctcacatggttgctttaattttcttactacagcttttgaaacccccacttaatactgatggactcccatatttcatttaagtgtgtgcctgagaggagctgagttgcttctaaggcgagtgggtagctctggctcttactgggggaaactctgtgttggggctaagctcagagcatgggagcctacacatcaccctggctggccctcctggtagcgctctgggctggagatgtttcacctcctggggactggctgcagagagggtggtctgagcctccagggacctggcctcccctgaataacagcagccaatatttatggccatagcctttgacaatattggcccgctctgctccacattctgtgctgagctctcgatgtgtgtcatccccttagacctggccatccattcggagagaggcactagcctgagcccctttcacagatgagaaaactgaggctttggaaggaaagagggacttgttccaggctacgcagctgttaagagctgaaggtagagagctgtctgcctccaaagctgagaacaaaatgttctccttccttcttgaacctgtctgcctgcatctggaattatttggagctttacgctaacctaacactggatattatcctgttgttttgaagattcaatgagacattgatttgtgtacaatacctgatcacagtaagagctcaaatgccaaaaacatgtccgtctgtgagggcagaggggatgtataggcagcataccctgtccaaacaggaacattttctttcaggaaatgctcattgctgctttcctttttcagttttctaaatcattttgggaggggagagagtttagaaaactcgtttatttgggtaagatttctgatgggttgtggctattcctgggacaatgtgattgtcaggaaatgttatcaaaatgaggagattccctctcaaaggtacatggccctggccttgggaagagacatggatgcacttgtcatgtttggagtgaccagcagggaccaggaccatctgggggcaaatgccttcctgagacagcgttcccgtgtgtcccgtggaacagggagggcaaaagctcctagtgaattataaagtctgctgcatgtgtgagagaagacaatggtggcattaatggtgaaaataaagagaagaataaaaaaacaggtacacaggcttgttcctgaaggctgcaagaaacagaattagattttgttgctagataccagaaagtgaaaatttcagcgtggcttttcatttggcatcatggattttaacaaaataaaataaacatctggttgtttgaatgccagtgaggcaccctctttcccaccaccctgccccctgattcagccaaactgtgtgtgtaaacactgtcttaattgacttcaggttagggaagtctggaaaacaagcttaaattcataaaactggaatggacatccttgaggcctctccaatcatcaaacagtaggtatttatttatcaaccacttactgggcgcacggctttgttaggtatcaatggggaacaaatgccggtaatattggtccaccatcctagaggaggccacatttggggtgaaaagactcttctagcaaaacaaaggtccagtgaagaactaagtcctgttgtagagaaaggggagaaatggggccttctgaggatgggaggggatgccagagaggaagcgatttgaaagggatttgaatccggataattatgctggcgatgagtttggtaaggaagcctcatttagttcacattcaggtcgagtctctctctttctctctgtataaagatgtgtctattttgagactcaggaaagaaatgattctatttgcaaagtagatatttgtttgttgtttattaatcatcacgaacagctttccactggattcactggcactaaatggctgcccttcaaatcttatccttaaagcaggatcttggggttctctggtggttcagagaggaggggtttggagccagaccacttggtttcatacccagctgccccatttcctgcgtcacccaggcacatgactgtctttgcacctcagttttcccgtctgtaaaatggaaggatcgtagtaattgggacttaccttacaatttgtgtaaggactgaatggcacataatcagctgtcccattcttaaaaccaaagtgaggaggatctgataaaaaccactcctcccctgcaaacaacatgatttttgttttccttttggcaatgcttggttttttttctctttcattttagcaaatcattgtagaaggaattttgcagcttgactgaagataccggctaactattgtgagtagtttatagcctggtggtcagtgaggctgctgcttacggtctgagctaggaaaggcagaagaacatgtttctagaggagttaagggctggaggtggggagggagatttgtttgcacagaccagaggcctcccaacaaaatctccaagatctttcaaaagcaaatcagaccgctgaccagctggctgagccggcagagttgagcaggatctttctgtattaaccgtgaggtctgctcaggagaccacctccgctggcccaccccccacatgcacatgaaaaaaggaggcagactttgcatcagggcggtcgtctccagagatctgcggccaggggacaagcccgtccccgctcggatcccaggccagatggaacaggaagatccggatactaaaaatcaacttgtcaccgagacattcctcaactgttaatcaaattggggctgagggtgagggggtgggaataccaaaaggacatcaaagggggtctcacgcccagactccgctccgtttcaaggctctgtaatttgggaaggttgtatgctaaataatttgcgaggctcccaacatgcaggttattgtttgtggacagatggtgcattgcgttttatcgcttttccttctgtgggccctcatatgtgggactgatgtgtattgtgaagtctttgtctccttgctaaaatctctaatctaaaacaggcaatcaagcacagaggcagggcttcagaaggcatcatcagagttttaaaagcaaagaaaaaaaaatggggaggggggaaaccagacatccaactgcagttacgaggcagatgtgtttgcagagaacgtgagaggttattagggtattaaaagtggacaaatgaaagggattcggaagcacagagggagagaaagggccacgctgtggcagtggtgggcacccgggtggtgatgcctagcatcacccctgcctgcagcctctgcccgggcctccacctcccctccagagaccgggggtctttgtctctgcaggcggtcatggccgggcctgggaggccccctctcggatcccaggctgcccttaagagttaaatcatgtggatatacaggaaggaaatgaaatagacgaacttgctcctcttttcttcctacggatttttctttttgattctgaagatagaattactgtttgtaagcatctgaaagtcattagaaaccctgcagtctgtcaggtgccgacgcaagaaactgctgaaaccaaacgggtgcctgcaccgagggctgggaattcatcatgtgctgatgagcagttataataatatatgagcaaatcacaagcattctgcaaattaatcaaatttttttccccttctcccttgtctctgggagagtggctttgcaggcagacgtaggtgaagcagttttactcacagatggtcgctctggcatcagatggaatttatataacagtaattctgattctttgccaaagaggcagcgaacacaccagggagattgtagaaggcaagtcatgtggttttgctgaggttgttgtgggaagtttaaggggggaaatctcaaattttcctctttgcctttactgtttttgcctgaagggccagaaacggaacgccgttctgccatgggcgaaatccgtcacgtcttttctcgcgacttgtgctgaaagagtgcttcgcagctgttgcaactgctggcggtgacagagccccaagactccggctcctggctggctccttacaagatttaaaggggagagggttcagaaggtggccacgctgcacactaggaagaggcagagctgcctcctcgcacgcccacagcgcttacttacccttctgctccctgtggcattgctaaacctataagggcttttcttttgaagtgttttattaaatgaagagtctaacaaccctcactttaattacacacgggctccgtttataattcctctggatttattcaagtagttgaaaacgatggtgcctggtgattaagctgatcatcttagtttagcagctccaaaacctgggggggagagagagagagagagagagagagagtgtgtgtatacgtgtgcagcgtggaggtgctactagtgtgtgcttgcacatggtcgcttgtccctatgcctctccgtgcttcggacaccccccactcattttaaacttctctctcccttgagaaacctcatctcgcatgggacaaagggatacatgagctgaccctcttgggtccacactggatcacaccacaaggtgcccttatccctgctgaaggaaggatgataccaagatggcgtgtagactgcattatgcaatacagtcctgatgctgtgaggtttttttccccctccccctgatgtaaagccctgcccatttgttttggtttacgtgactacagagaaataagtggattagatggaaactttcacatgcttcattgcagctgggtgcggacatctgtcattcctcagccatattctggattatgccagcaagaggatatgcaaagtctgacacctttgattttagagagagccttttatagtggggggagagaagagaagaaaggaggctcatttcctttgtgacttcataaaaaaaaaagaaagacacctctcttctgtgttttattttatttatttatgtctgccacgtgacattagtggcgctccaggatgagggctgagcattgaaaagtttatgcttccatctttcctttttactttgtaattttctattgttcacagtaccaatttgttgaattgggcatgataaaaagtagctattttaaatatatccagtgtgcccatctatatggatatatactgtgggtatggattgcgggtgtctgattcctttatgggaagagagatgtgcgattctttctcacacataaactcacattaatacaatacaacctcactgaattttgatggaatgtgactgctcccgcgacactgtttttggtgagctgctctgcaacccatatggcccccccaacccactgtaggaaatgcactaatgtttttatgaaagatgtgtgcaggtagtgaattatccacagataaccttggatgccagctttcagtggattggatatcgatacacttaaggtgcttcatgctggtggtttcataggttggcccctccccttgtggctttcctggtgccatacagagcacagcacacccttggcacaagccaagttccaatattggcccccctcccacatttaagttgtacaataaaacagaaactacaattaagggctgatgtgttcattttaagcgacacaatggaaaacaggaagtgattgaaccagcagggaccacccacttgtttatttcactgggtgtgtacaagaatgcagttcatctgctgggtgaaaaaacacacaaagcctcacccagtctccctgccccaacctcaaagaaagtgcaatactggctgtttagttgagagtggtacaaagtggagattggaaagtccagggcccacaggcgcctggctggtgatgcctgggaagtaaatgggtgccaggcagcgggaataagtgggacccagctccccagcggctgcctccaggaagatcttgccagacctcctgactttgcaagagaaactggaaatccatgttttaatgtgaaatatttttttaaatgtaacattggcaatgaattacatttttttttaaagaaatagtgttgggggaaaaaaatatgtgggcctgcagcttgtaaccactaggagggtgaatgcatttatgtctacagcagtgatggaatctatggtgcagccacttggcccccatgggggaggcctgtgggcttttggagctcacagtcagggtgggccgtgccatcccagtcccccacagaaagtggtaaggtggagggcaagagtgaggagggcagggcgtggttcttggagatgtgattgggattctgagcttcaatgcaggaaagaggaaaatgcagagctacccagtatgtcaaggtgcacctgagaagccgttcaacactctccaccaacgtggagaatgggaggaagagcgtagtattaatagctgagattggggttactaaagggaccccctggaacacagagcactcagattttcctgctgaggaaaacagcaaggcatggtggggcattccaggtatgaggcacagaccaggtagggacagtgtgcaggggagggtgctccagggtcacctgttaggaggtgtggcctgcacggaggaaggaagccaagtgccaggctctgagcagggtgtgcatagcaaggtggggactcctgtgggctgaacccccagaaagaggtccttcagtaaacaacgtctggttccttatccagtccctactgtgtgcagagcccgccagagggcagcagtttccagcctcctagagccattagcgaacagtgcctgacagaacataattaagtgcctaattgtgtggtgccacagataagtggagctctgcagactgggtcctgagaaccgcttctaggaggagttggggctttggcgggtctcaatggaagaagatgtgggggctggagatgggtgaatttctggtaggaacgacagtgtatagtaggtaagaagggattgcaatttggaaagccaggttaaggaggtgagatactgcagtgagaaatagggagccatggatggctatagaggaggggtgggcacatgtatagccaggatttggggacttgacttggtatggatggtgtggctttcttctgcctggagaggtctcactgttggtctgaggtggactattgacccagtggacttgatggtacccagaagagggtttacagggacagggctggctgtcaccatctctgctaaattccgtgcatccttacagcccatcttattgccaacagggatttcagataactgtgtttagcccaatgttcctaaggagggaagcgagggatattaaatgtgtatcataggtgctgcgtctgctaattttagactccttatttttgccatctctgagtgtcaccctaataatttcacttaatatttaaaaattaattggttaaaaacttaaaaatacacaactctagctttgttttaggaataatatccaactctgattcactagtttttgggatttttgctaaagctgttaacctgaaaagtggtcagcttggttccatttaaaattacctttgaagccggtttaataagcacctctcccccagcccccgcaatgttggagagagaagggaatttctggaggagtgaggtgggccaccagcccctccgctcccggctcccccactccagcacttccaggccagcgccttctctttggtttctcccggcatttctttaaagactaaatgcactcacccagagacaaactctgggtatcattagagtattattatattacacatcgaaaaatcttcaaaaacggaatgtaagttcattgaccctttgaaggttatttaatgataaacataaatgctttcataaaatccgggcaatgatttaaggtccccgatcaatagttgctgttgagtgcacactggcagggcaggccggcttgcctgaccacccaggcgggctgatggctccactcatcagaggagcctgggtaagcaaataaacaggatataaggcaaaatctgtagggcatgcgcaatggcgggggatgaagttgctggggaagggagccacctagaggccaggccccaggaagagtagccctgaagccaacacctggtggggctgagctgggaggcatgggagactctgcaccaccagccagaggctcctctctgctgatgccctgctgaaatctggcgacatctaagctcttatcctaactcaacttgggcctcaagctgcagggagacagcaagacacagtgcaggttgagctccagctgcaggaccatgttctgcctctctctggctttgtggctctggacagatgctgtgctagtccattctcacactgctacaaagatatgatcagagacagggtaatttataaacaaaagaggtctaattgactcatagttctgcatggctgaggaggcctcaggaaacttacagtcatggcgtaaggtaaaggggaagccaggcatgggggcaggtgagagagagagcaagtgggaactgccaaacacttttaaaaccatcagcactcatgagaactccctcactatcaagagaacagcatgggggaaatggtccccatgatccaatcacctcccaccaggtccctgcctcaacacctagggatcgcaattcaagttgagatttggatggggacacagagccaaaccatatcatccaacaaatgggagcccaacccctgatttcagcattggcagaggaatcaaaatgcacatctcccatttgaagttcaaggttaccatgcaatgggcacgtagtaggtggagtattttaatacttacagccttttctagcagacattcatttaactctatgtgctgcactttgtgcttaagcatcaggcctcatctcattgaatcctcacagcaatcctattagggagctattattattattgcacccattttaccgatgagaaaactgagacttagaaaggttaactagctggttcaagagcacacacaaccgataagaggcagatacgttagagccttggtgtctggcttgaaaatctacagtcttcatcactgtgcttgaataatgaaaaatgctgcatgctagcagggcagtggcgatttctcaaaatctgctctgctgccttccctgatccttgggttgcaggcccagcagactgtgtgtgtgccatatgccctccagaagttttcgtgtcaacagaagttaagtattacctgtttggttctgtgactttggaagcatctcttgatgtggggtgttggtttcttcctgttcacagaaaatcaatcaaatccacttttaaataaactttcaaaataaacttttaattttagtatggatttagatttataaaaatgtttcatagacgtgggatgtggtgcttcacgcctgtaatcccagcactgtgggaggccatggcaggcggatcacctgaggtcaactgttcaagaccagcctggccaacatggtgaaacccagtctctactaaaaatacaaaaattagctggacccattggtgcacgcctgtagtcccagctacgcaggatgctgagtctggagaatcacttgaacctgggaggtggacgctgcagtgaactgagactgcgccactgtactccagcctgggtgacagagcaagactcagtctcaaaaaaaaaaaaaaagtttgcatagataatacagagaactctcatagatttcaccgccatttcccactattattaacatcttacattggtagggtatgtttgtcacaattcacgaagcaatattgacacattatttttaaataaagtccatcttgtattcttagtgttttagtttttatccgatgtcctgttctgctccaggataccatattaccttaggtgtcctgtctccttccaccttcctggctgcaacagtttctcacttttcttgtttctgatgaccttgacagtttccaggagtattttgcagaacgtccctcagttgcaatttctcatgtgtagactggggttatggatttagggaaggaagaccacaaaggtaaattaccattctcatcatatcaagtcaagggcacctgctgtcagcctgaccttggtctgctggctgaggtcatgtttgtctggtttctccacggaagttactctcccgtccctttccatactgtactctttggaaggaagtcacttggcacagtccactcttaaggagtagggagatatgctccgtctccttgagcaagaaatagctacaaaattatttggaatgcacaaggcatttgtcaatccttccccctgtatttattgatgcaatcatttatgccagtatgatttgtggatatttattttagactctgggtcataatctgatattatgttgtttactttgttactcaaatggttctacctttgggtatgggggcttcttcagcaagctctgtgctaatctgacacccccactccaccatcaatatgtgggggtttttttttagtactttcttactttctagcactaaataccccgggattattttggtgtatttcctatcccagtcctagaatcagccatttctccaaggagccctggttccctttttttgggagtggtattagaaaccaatgtcaccacttctagaccctctcagctgacagaataaggaaatatatgcttgtgtactaactcctgtatatacacacatctatattataaatatgaagttaagcttgagttcacacagatgtcttcaatccattaccacacagatcaaaatgcacttgtaaaataagtacatttttttttgggtagccttctaaattaaaacccaaatcacaggaaatttgaaacctaaatttatttgtactaaggatattccaaagtgttttagcatctttgatgagatggatgaatatttttttaaaactgaaaacataaattacgtacctgattggaatcattctcgcctatttggaattaggaaatttttttaaactatatgtgcaactgagaaaacggctctctctgtgggcctagtgattctttatgtatatttttacctctctcattgccctgctgagccactgagcctcttgaagctgaaggcaggattgccagggtcctgggctggcatcctcccattttgcagcctcagggtcaaagtggtaaatattcaaaggaagcagcaggtgatggtgaggggcttcaaggtccccaagtgaagaccagccaagcaccctgcaggcctgacccactcatgaacctgttgtaccaccatacccagtggattccccccaggccggcggggcccactctggggagctgaatttctttttcctcctttcctttctctcttctttctctttctctcttttttctctttctttctttcttactttctttctttattcctttctttctttctctccctccctccgcctccctccttctctctccctctttctttctctttccttcctttcttcctccctccctccctgtctctttctttcccttccttcccttctttccttctttcttttctttccttctttcttttctttccttctttctttccttctttctttccttctttctttctttctttctttctttctctctctctctctctttctttctttctctttgtgtctttctttctctccctccctccttccctctccctctttctttctctatccctccttcctccctccctcccccctccttccttccttccttcctcctttcttactttccttccttcctttcttccttctctttttcagagtcttgctctgttgcccaggctgcagtgcactggcactccaaccactcactgcaatctccaactcttgggctcaagtgaccctcctgcctcaggctcccaagtagctgggatcacagatgtgtgccaccatacctggctcattttaaaatttttgtagggatgagggcttattatattgtccaggctggtcttgaattcttggcctccagcaatcctcctgccttggcctcctaaagctgtggaatttcaggcctgagcctcccgtggccctgaatttttaatgtatcctattgacctataagaggtcaatgtatcaaatgtatccaatggtcaaatgtatccaattgacctatagggggatacctttttaatgtatccaactgacctatagtgatgaagacctatagtttcttacctagctgcaggcattgcctaaatgttcctaatttcaaggagttcaggcggcgctggttgtgcagctctgggagaagtgtgttatagggagcccctctgggtgctagtgggcagtggctgttctcaagccttacagccctgtgtgtgggaactgatgcggaggctgcttctctccacttgatcacctgctcccttctaggcaatggcactgtcaaacgtggatgcaggacgcccttctgcagtagagatattttgtgatcccatgctctgaaaatgatgttcctcgtgctcaatgcccagctttgatgggcttctgttcctgtaaggggagtgacatctggtgcatgtgctatatctcactctcacacacacacacacacacacacacacgcaaacacacacagacacacacaaacacaaacacacacacaaacacacagacacagacgcatacaaacacaaacacacatacacaaacacacacagacacacacaaacacaaacacaccaacacacacacagacacacacaaacacaaatacacaaacacaaacacacagacacacccaaacacacacagacacaaaaacacacaaacacacacacagacacaaacacacagaaacacaaacacacaaacacacacagacacacacaaacacacacacagacacaaaaactcacaaacacacagacacacaaacacacagacacacaaacacacacacaaacacacacacatacacatggtacacaccccttcagggggttcatggaccacctcttggagcatctttgactcctaaccagaggcccctctttgtagagactcttccagcaagcaggttgcagtccatggcaggagcaggtggagagacgagcattcttttagagaagacatgaagttgaattcctgatcagtaagcagtaagttccatacgtgtgactttggatgatcatttaatctccctggatcggggatttcatgtctgtaaggtgggaagacatccctctgccatatctccctactgacagtcatgaggaccaactgaggccactcatgctgatgcactttgatgagtgggtgccagaacatgttcaccaatgggcactgtcaccactccaggactaaacaccacagggtggtcacctcttctctccccactctcttaccctctgtcccacacttgaggagaagccatcagtttggaaagtctggaagccccatagacgcagccccctctcttccacaaagccagctgcccacaagtgtggtgctgtaatgaatggatggccctcccaagggcaggcattttctactcccccttaggtgcggcgaaagagcagatatttccatcctagcaagtaagaaaaatatctcgtttccccactttcgttataaacaatgtacgacttgctttctccttactcctcttgaccctccgcactgtatacatatttatatattattcatagtggattaaaaatgaatgtgctctttaccacggctctacggcgcagcgacaatacaaattaacgtatgatgtacttacttttcgcatggcagtgatgggaaatgttgatggcctcaaagtgagaggtagagagaggggaatgaggtggggcgggcagttgggggggcccccatctggccacaccaccagggctctgagccctggataaagatagatggggattgggaacattctgggaactggtgtggcggcagtgctggaaaagtcttcccaattctcttctcccacggaacgagggccaagtttcccggtggatcctgtgtgcctggcccctgttcaccctccccactgagcttcccctgtacctcgctgacctgctcctaggatgctgcactgacccaggcttcctgcttctgtgcctgggctcaggtgtgcccctcagactgcagtagcactgtctctctttcctatctcctggcaacctgtttcattcatctgttcctttgctggaaaaaaatgcttggcggaaatctgtgatgtgccaagcaccgtgctgggtggtgagtaacaacaatcatcaaaaaacccaaacaaccccaaaataaaagctcagtccttgcccccgtggagctgacagtctgcctggtggggaagacagccgtgattgttttatttgttcagcttctgctagcagccagactgaggaagaggcgtgtgctgggatgtgtgtcacagccatggtggcaggcctggggtcatccgggaggccttccccaggcagaggcagctgcatggaggcctggaggatgagtttgcaggagttggatgaagtaggggcaggcagagtccagatcgaggagacgatcagggaggatcgagcaaaggtcccggggcagaaaagagcatgatgcatttggagaacagagagaagtctcctgtggccagagtgcagcaaactatgcaggctttaagggagatgaggaggggggatgctcagaggctcagattcctcctggcaggtgttacgggagctccccatcacttgtacaatatcacagcccgcactgcctcccagtgctgtttgggacctggcccccagccaacttagccctaccttctaaatggggagttccttctggcaagaggcctcacccacatcaaattctatctcacatttgctgaactttctcccagtgaaatgcacctgttaacaacttgttcctttgggctttgaaggtcctccggtttcccagatcccccattcaaatgcctatgccccaaagagagacagtcccttaagctttcatggtgctacctgcggcaggaagcacaggacagtggcacaggaagcacttgctaagtcagtactttcgatgaagaaccaggcagagcttcccctgagtcagcttagatcaacagcaggatgacagcagcagccgtgccaatcaccagcagccgacatcttggagttcttcgtcatttaccaatgtgtcacatgccatcatctgatgctcacagcactcctgtgatatagtgtcagtattattgcatcattatcaaggtgtggaaatggaagccttgagttctagtggttgcccaaggtcagagagagagaagattgaagttcagggtgctagtagcttagcagccttacaaaagagggaagcagtggtaggaacccaagctcctcagtccactggggagaaggagtgccctgaaagtaaagcaaaggtgccagaacaagagagctctgggtcttcctatttgaccaaaggccatcctggagtgtggtgcttcttagcaagttcaacttgggagaggctatcgccttgatgctctctccaatggggagctggcaggagtgggtgttattctcttcagttccgccacaatggaagcctgcttgacccaagtctgtcttaatacttattctgcatcttcaacattgatggacattagcatcttccttacacctctaggaatccccaaatctaggtccagtcaactaagatggcacaggcaacatggctggtcttttgtttcattaaaaagagatagatgggctgggcacagtggttcacgccagtaatcccagcactttgggaggctgaggtgggcggatcacctgaggtcaggagttcgagactaacctgaccaacctggtgaaaccccacctctattaaaaatacaaaaattacccgggcatggtagcaggcacctgtaatcccagctacttgggaggctgaggcaggagaatggcttaaacccgggaggcagaggttgcagtgagctgagatcgtgccattgcactccagcctgggcaacaagagtgagagtccatctcaaaaaaaaaaaaaaaaaaaaaaagagatagatggaagtgagcaggccactgaggggctgccttgtcacctctgggactgcagcggcttctcctctggggatgagatgacctacctccatctagagagatctgacttcttccaaacccacagccccctcagcaggaatgtctcgcggtgttgttccatgggcccctcttgctgctgctgccttcaggagggtctctgctgtcagaaatatgtgaaatccacagggacgtattcagcagagctcagcactttttttttttttttctggagcacttgcttatgttctctgacccaaagccaacagatcccagtcttattatcatcaggggctttcacagggacaaatggtagagagacatttggaactttttatccagatttacttggactcagaaatgtgtcatgtccaacagtactgtgcatagcaacagctttctgtttgggaataaatgttctcatcatcaaaagatcaggctttcagttatatttgattcttgggaaaatataatggcttattccgggcctatcatagcttctcccagtcaacttccccaagggtgggcctttcacttcttcatagaactttcttccacatcagtctcatgggagcctttcagcaaacaactcagaaagatgtgtgtgtgtgtgtgtgtgtgtgtgtctataaacaatattatggatatagaataaaacgcattgtaaattgtgtataaactaacacattatgtgtgtgtgtatgtgtgtttgagcctataaaaacacattttaatcacagtctttgtaataagtttagagaatgagggtgactaagtactttatatccattggaaatttgttttaaagccaaaccttctagattcactgtatctcagctctctcatctgtacaatggagctgatatcatcccttggcaaaattgtccaaagctcaaatatgaggataaacatgcaaaaatgtatgtgaaaaactgtggaatgaaggtcttcagggtctttaggtactatcagtattatctacaaagcttctacttactagatacactgcaagatcaggatttattatgattctagcattgtatagacttctttctacaaatggatatgtgcatagctttagatggatttacatatagatttccatctcacctaagtgaaaatgaaaccaattcaatactaatgttttgaccagtgaagtatccaaatctgccagaattattattatacatttggctattaccaagaaacagagattcaaaatataaccataggataaaatcatgattaatattttaaaatcgattggtggaaaaaaggtactaagtgcttttataccaagttggccaaatcaaaaaggctttcattgcaaataaaggtgatatctgaggtccacattttagtttgccaagaggcacgttgcatcactcctgtggcagtatcatttgtagggagggtggcttccatgtagcataggattcatacgtgaaattattactcagtaatgtgacaatcgaaagtacaatagacagttggctgggcgcggtggctcacgcctgtaatcccagcactttgggatgctgaggcgggtggatcacgaggtcaggagattgagaccatcctggctaacacggtgaaaccccgtctctactaaaaaaaatacaaaaagttagccggtcgtggtggcgggtgcgtgtagtcccagctactcaggaggctgaggcaggagaaaggtgtgaacccgggaggcagagcttgtagtgagccgagatcacaccactgcactgcagcctgtgcaatgagtgaaactctgtctcaaaaaaaaaaaaaaagaaagaaaatacaatagacagttttgctgatgaacaaaaacaactgaagaatggaagaactagtgtcatcctggtaaaccgaggcagatttataaacaatagtgaggtttggtcgctttgtttcatagtgctgctggcctatttggatcatggtaccaagggttttggttttattttttatttttacttactatttggagttctttactcgaaagacttgtcatacgatagtgacattctccatcaataaattattgccatataatgaataaatgaatgacttagccctagctttatctgagccatggtaattaggacagtggccagcctttgtccatgaactgctacagagctgcccttggtagaaacatagaaaatacagtccatttcagagaagctttggccaaagcctcgaaacatttctcaggtttcccggtgtcttgctccttctttatgttgtttgggatgaccttcaattggcttgtaggcctccagctacaaattgggcccgcctttttcttgcttaatagtgtccatttcagagtagctcgaactctctctcagtgagtcctgggcatagcttcgggcccacagggatgataacttaaaaaattggatggctgaatcttgggggctctgtgttgtctctaagatgcttggccaggacgatctacttggaactcactcatgcccagcttagtcctgacttagattcaccattaaggtacggagaatgggtgtggctttgcccatcccattgcctctgattggcatcctaattccatccttcagtctatgccctaactcccaggtcatgaagaacagggaccatttgcatttttttgtataatcgaaaatttgcattggaaatatgtcccagttgtccttcgcctcccaacccagggccttccctaggtgaccaagcccttaaggtgaaaagggtggcaagacagcaaatgggcagtcaccctggggactccttctcttacctggcaatcatggcactggcccctcgtgctagctgtgctcttcctcctgtggttggctgtcaggaagggccaacagcaagtgcactgttcttgtactttattttgttcttaactccgaagtctgtagatttgcacattgtcttcttgaagtgggaaggttgatgaaatttagccttgtcttagggacaacagtagaaacagaagaagcagaagcactatccaaaaatgtgtaattcctggcagggcatggtggctcacgtctgtaatcccagcactttgggaggccaaagtgggtggatcacctgaggtcaggagtttgagaccagcctggccaacatggagaaaccccatctctactaaaaatacaaaaattagctgggcatggtggcttatgcctgtaattccagctactcggggagtctaaggcgggagaatcacttgaacccaggaggcagaggttgcagtaagctgagatcatgccactgcattgcagcctgggtaacagagtgagactccatcaaaaaaaaaaaaaaaagaaaatccaaaaatgtataattccttagaaaaaggcaaggtgatacaagaatataattaataattcctgactacctgctttgtgccaggcactgggcttggcattcataacactgagatggtcatggttcttgccccaggaattcacggcctttttgggaggaccagtacatacactcaggcccacaaagcaggcatcctgctgatcaaagcctgaatagagaagtgggtttgagcctgcagagaatgaagtggcatttcagagagagggtagacaagcaagggtatggagacactgcacagtgacgtctatgtgcagagaccatctgaggtttggtttggtgtgggcaaaaggggttgtgctgtagcgtggaatggaagggtgttttaggattgagccatgaaagtcctgattattcctttggaggccagtggccatgaaagatctggggcaaataaatcacaggctgagcttctgctttaggcactcgctctgttgtccctggggaggacaggctggcggtgggaaactggaagcatgaaggccacccgcgggctgccatgttcatagtctagacaataattggtacacactggacctggttctgaagtcagcattgcaaaggaaaagattcaacaggtagaatggattagtcctggacaccagttggttatgagggaacaaagaggcagtgaactccagaagcccaacaagaagcaagaatttagcactgggtgcaattcagtgggaaagtgagcttctgcttccaacgttgcattggattcctgtttctcaggaacaagactgttttgctaaatagacgcaggactgctattactgctttagaaaaagtgctgaatatgtgtttgcttgttctctggagccagtgatggggctctccatttatttacttgtttatttttttgagcaaatgaaacccagctctgggccctgacctctctgagtgctgggtgaaacagcacatgagagcttccaggaacggctcatcaacagcttcccggaagcaggggagatgccattgcttcagaataacttccccagccagatgttttaccagttcctcgagatggtagagtctgtgcatggctgtgacgcatcagggtagagatgttgcgcttggaggattaggtgaacgtccacaggaatccacctcctgttccaaattacagtctttctaggaaggtttcatttcaagagtcactattcaaaatctaccttctttaaaactcatgctggccttgattacctgttcatctttctcctggtcccgacaactttcgctgctgcccctgagaccctcagactctagaaatccccccagctcagcccttccaactctgcctaagagcaagactcaggtgacacccctcactcaccccacccccaaacacacgctcccttgccattcttggtttgctcaacaataaagagtcaacgggaggatcagaacatgagctggctttgccctgaggcctgagtcagactcccagatggaaggatttatggtctttgtgcagaattggggtcagcaaagtgtagctcgtggacaaaatctaactattgcctggttttttgtttgtttgtttgttctttgtgtttgtgaaagggtcttgcttgttgtccaggctgtagtgcactggtaccatcatagctcactgcagcctcaaacacctggctcaagtgatcctcctgcctaagcctcctgagtagctgggaccacaggcatgtccctggctaatttttaaattttttttgtacagacagtctcaccatgttgcccaggctgatctcaaactcctgggctcaaacgactgacttgcctcagcctcccaaagtgttgggattccaggcgtgagccactgtgtccagcaattgtttgtttttatacagcctgtgagctaggaatggtttttccatttttttaatgtttaggaaaaaaactcaaatgagaataatagtagttcatcccacatgaaatttatataaaatttaaatttcagtgtccataaataaagttttgaatttcatcaataaaaagttgaggaatatttgtttcctgtcttgttctctaaatacctacacagtatcttggattttgcctctttgcctgcaaatctgggactatttattatttaaccctttatagaaaaaaattcagatatggggagacttatcttcaattacctagaaagtctgggttcaaaactctagctagagcctggtgtggtggcttgcacctgtaatctcagctacttaagaggttgaaaagagagggtcccttgaggcaggagctcgagaccagcctaggcaacatagcgagatcctgtctctaaaacaaacaaacaaaattgctgggcattgtggtgtacctgtagtcccagctactctggaggctaaggcgggaggatggcttgagcccaggagtttgaggctgcagtgagatataatcgcaccactgcactcccagcctgagatgaggaacgggacttgatctctaaaaacaacaacaaaaatattcagggatgggaagatcttctaaatcttagcttatgtgcctgatgtatcggctgcttttctcactctcactatttgatttttgcaaagtaataataatattgatcatactggtgattgcaattatgatcctttgagccctgggggccaggaaggtgtgagcaacagtgctgaccggccactctttctgcccacaggtcacaggcctttccagtgccgctactgtccctacagtgcctctcagaaggggaacctgaagacccatgtcctctgcgtccatcgcatgccttttgacaacagccagtatcccgaccgcaggttcaagcgctccagggtcgactcagaggcttctgggaatttcgaggagcctacagctgtcaaggcggggagctctgcagacctcacggaagagggcggcaagggccaggaggagaccaactgagcagaccaacctgtatattgcaatagtattttacacagttttaacattatgcatctggtaaaagtttgctaactgcattccaaggggaaaaaatcatgtacaaccccccaatagtgtatagaacatttaaaaaattttaaaagatatctatatatatattaaaaaaaaaaaattccccagcccttgaaaatggctgctaaactgttacccggcaacaagtacttccaaaacaatgcaggtgggagaaaagtgatttcaaaaattcttggtgccctctgagctggagagagctgggggcccttccaactcgaaagtcgtctttgtccaaaaataatgctcttaactgaaaaacgataccatctaaacgatttagtgttgcgttgaagatggaggggctgtgttttcgttgttgaaaacacctctataatctgacaccagctgctgtaattcgcctagaaccctaatgagatgtgtcgggaggcagctgcggtgccagtcagactggagcggtcactgcagagaaaatcaattcacgtggtgttgtaactgcactcttggagaaaccttagacggcccgcagccagcgccggggctgaccggcactgcagaggattgagatcttaaatgcgcatttttacaaaatacacagccaaatgaaatcaatgatcaggaagtgtctgcagacaaatgtccattgcaggtttgatgagtaattcctttttttagatcaaattgttctcggtagccttttcttcttttttaaaaaaaaattttggatgaagaaggaagttgctattaaaaaaaagtagggtacattatataaaatgttgttagaaaaactagctaaccccatccatagaagatgctggtgagcaattaaaatttaggtaataatagaaagatttttttactatgatttttaaaattttacttgaatgaaggctgctccggtccttattatcggattttttttcatgtgttggtttttataagtgtcacagacatgaagcaagattttcttctccagcaagctcttatgaaatagcttgtattaaaatatgatctaaacatcgtgctctctatctctaatgacgaaaactgtttgagttaaaaatgtctgtttttgtaaaacaaatgtgttctatatttttgtagattttagattttctactgattggatactccaaatttatcaagttctgcaccacacagaaggagattttgagtgtcaataatgaaacacttaactcattaaaaaaatgatttaagaagactagttaaaggtttattcttgaatctgctagcatggtgtaaagttgagccttttaacatacttcctttgagtgacatgaaattggtgctgttgcttgtggtggtagagaagtatgaaagtattaacttcttctaaaacaaaatcattcagacttaaaaaaaaaaaaaaggtcaatatttccttgcaggctgggagcacagattaaaccccagggccttaaaaacttcagctctgcctacagcagtttacaaaaatactaaactgcaatcaatgtaaataaaattcttagtgctatcctgagaccagaaagaatctcaggctaataaggaatccggtttgcatatgctgtcaaaagggtgtcatctaaccgaggtttcagtgtaaatgaggtcgctgtgcaacttggacccatctggcatagagcaagctgctttcttgtttttctagtatagttctcactgccttacttaaatcgagttgataaacttaatgcaactgtttctatgatcctagagaaaggactgaaatgttattgaaaactttccgactgtagtaagctttaggattttgactgcactactgtgtttggtgactgtgccagtcccttgctttctgtgtttgctctgcctttggtatcttagcaaagaaaaataaaaaaagaaaaaaaaaacataaaaaaaaaagaaaaaagaaaaaaaagaggaaaaaaaagtgggggaaaaaatgagagccacattccatttctagcactttgggagctctttcagtatttttttgtgtcttttcagcatcctcagatgcgacaggcaataattctgtttgtgacactgggaacatcccctcttctttgtggtgtgtgttgattccattttgtccagtgctgctgtccttcctccccctctgacacaggccttctttccagaacatttgtaacttgtaatacaaacaagtgacagccacagtgatgcagcgtcagtttctgaatgtcatcaggttctcatatctaaacatgtcaagttttttccctgtaacttctgtagtctgtgatgctggtcataatactgtctacattcctacgcaaagaaaaaaaaatctatcttggaggaaatctgagatcaataggagtagaggattttgttgctatgcttgtaacaagtagaaaactttgtatttaaagtttattcttggtcattatttattattataatacatcagttgacagaactttattctggtatagaaagtattaaaagttgttttttcagcaatgactgttttctttctgctgttagaataaaatgtctttgaagcagcccagttttatccagtgttttacgcaataaaacctctacctctgggaaaaaaaatcacatcttttcctactcgcttatgtttactaggaggagtaaaacatatttttgcaggtttgtcagactttggcaagacgttgtcaaactccatgtataaaaagccctgtactgggcagggcgtggtggctcacacctgtaattccagccctttgggaggtggatcatctaaggtcaggagttcaagaccagcctggccaatatggcaaaaccccatctctactaaaaagacacaaaattggcatgggtcaagcctgtaatcccagcactttgggaggctgaggcgggcggatcacctgaggtcaggagctcgagaccagcctggccaacatggtaaaaccctgtctctactaaaaataacaaaaattacctgggcatggtggtgcgtgcctgcagtcctagctacttgggaggctgaggcaggaggatcgctcaaacccgggaggaggaggttgcagttagccgagatggtgccattgcactccagcctgggcgacagagggagactctgcctcgcacaaaacaaaacagaacaaaaaggccggtagggtcctgcagtactaatggtcctctcaggcctgtgctttttcaagctgagtcaacctctatgccgcatacatagtgtgtgagtggggatgtgtgtgtgtgtgtgtgtgtgtgtgtgcacatgcatatgtgaactatgcttctttaaatgtttgcagacatgtggttcagtaaggtaaagtctatggaaatactaatgctcttcatattacagtaattatataaggcacttagagcattgggatctattattttcctttactggtagaaagtcttttttttttaagtcattaaatgcaagggagtcttttacgtccatattattggaggataatcggaattcttcctctagaagaaaaggaaaagagcaaaggatgacaaagtgtctggtagcaggggctactgtgaacgcagagctccgacacggagttgagagggtttgaagtgcgtgctcaacccaggatgtgaagagcttctttttgatttgttttgttgttttattttggtctcaaaacaagctaggatagtgcatattctatatccagatagttctggaatatggagggcccactgaaatgtcacaagcaaagacagctgccaaattgtatagaaatttgtctgtttaccatgtttctttcagggtgtgagactgtgtccttgggtgggagcagatgacttaaacggaatcatcgtcagttctaaccgtctgctgttatgaatatcaaaggtgagttaaggggttgtagtgaggaggtcaggaagtaaacccatgagggagagaagactggaatgcagaaggttgagttagggattctaacatctacccacaccacgtccatgatgcagctcaaacccaccagagccacacaagacaccagagtggcgagaggagagttggaacaatcagggcttaagtgggttgcacagcacgccactctgatgggagggggtgccgtgagatctcagtaactgcacatcattgccaagaggaaggtgacattaaattttctgagttttcaaggtgtactggacacctggattttgtattaagtcttccagtttttccctgttggctcaaaatttatttttaaaaaccacgtatgaatgaatgaacagaatgtgttaccaccaaagaatggaatattattctgccatagaaaagaacctgagatgtggtacaacatggatgaacctagaaaacagtgagagaagccaattacaaaaggttgcatatgatagaattccatttacatgaaatgtctagaatagtcaaatccacagagacaaaagtggattagtgcttaccagggatgagggggaggagagaatgaacagtgacagctaatgagtatgaggtttctttttgaggtggtaaaagtgtcctaaaattagatagttatggtggctgtccttggtgtcacttggtgtatatgctaaaaaacactaaatcgtgcactttaaaagagtgaattttatagtatgtgaattatatctcaattaagctcttacaaaaaataaaactgtgagtaggaggcatttttaagaggtaacaatatatatttccatcaatacattgctgagttctcatacagccatagataattgacagattagtatagtacaaataatataaaatttggggtgtaatggcttaaatttgaaccctagctttattacttactggatgcatgatggtcttgaacaattttttttttgagacagtgtctcactctgtcacccaggctggagtgctgtcgcaccatcacagccctctgaagccttgaactctaaggcttaaccaatcctttcgcctcagcctcctgagtagctgggaccacgggtgcatgccaccatgcccagttagtttttaaatttttatcgagatgaggtcttgctatgttgcccactctggtcttgaaatcctgtgctcaaaggatcctcctgcctctgcctcccaaagtgctgggattataggcgtaagccaatcttgagcaatttaactcttctcagctcattgatagtatctgtaaaattatgacaattaagtgctgtacatagggaaatcatatgcacatttcgtgaagtactctacaaatgctaggtattgtgatcattgtggcataatgaattatggatgaatttaagattaatgtcacatgcacaaaaagctagaccttgataaaatccccatgctttgtaaaggtcccctcatggtcaggtggctgggattccccacgtccatccccttcagaaaagatgaccctagacaaagatcttcaactgctgttttctaatttcctcatttgaaaaatctgagtattaacaactctcttgtcactcacaggggtagtagcaaggtggctggtgaaaagggatggatgcaatgggaaaaagattagtctcagtggtagatgttattccactcacttgtttaacacatatttacagaagacctactgtgttctaggcattgggtcacgggccagagagagatatattggtaagttagggatcatgtccagagatcactgtcttaaggggaaaacagattttgatttcataatcacacaaataaatataaactgtctggaagaggagattcaaggagaacagtaattccccatgcgatggaagctgatgatttgctgagggatgcaggagggagggccaggcagtggaagcagtgcaaagccaatgttcagtgcagacaggactctcaagtcctgtcttggcctctcaggagctgtgtggccctgctagatcgttccatttccctaaatcggctgctcctctataaagtggaacatcgcagtgccaacagcaaagactctttctgaggttaaatgagatagtacatgtaacagctatggagagaacaagctagacactgccatattcaaaggacagttctcaaaagtgacagtgtctggaaacccatgaggacacggaaatggcgatgcctgctgcagaccatggctttctcatcctcatcgccaagggccaacatagtgtgagccacatgacttctgcagcacgttacctctcacatcccgatgcctcatgcccttaggaaggagtgggtgaaagtgtcctggggccaattcagggtctctatggctctgtccatgggcgtggccaccctgaagcagcatagtttgctggaagtgtttctagagggtgatcaaccatcctggtttccctgggactgaggggtttcccaggacatagtaattttagtgctaaaaccagggtagtcctggacaaacacaaatattccccctaggtctaagctggcttcctttaaaagcacgtgtcttgttttggccaagccgaggttatggctgtccctgagctgggaggccagtgtgaggcccggtgtgaaggggaagccatggctccagggggcccatagtatgggctttggcactgggagacttggattcaaagctttcctgccacagcatctttaccacaaagatgaaagtgacacagtacccaaaatacttagcgtggcacctggcacgtgggcattattttatccattctcattgagtgactgaatgaatctttgttcctccttcttacccaggtgggaaatggctcaaatatgaatttcttttcctagcagctagaagcttctgagctgccgatatctggcattaagatgctcttttgtgctgaaacttttataaagacgataaccctgctgtctcctgtagtttgggatttgcgcacttccccctctctgtttaacatctgtattgtaacagtatattacgaaaacctcacctggtgtattgtaagcacaatcccaaggaaattagtattaaatattgtgatcttcatttcaagatagaagggctgggcacgttccaccaaactggaggtatgtttccatagggaaggagaaaaattcatggtgtaatacaatattaaaaatgtcacccagctgagcattccatgtagaagcttgtgtagagttttaatctcttcacctgttggtgctaagagaaaagagagagttggggtgggggagggagaccgggagggagaggaagggcttatgagaacagggaaatcacaagcaaagaggagggggaaaatttaaatgatcccagaccaaactgttttgctgttaatacagaaatacagtgcaagacacatttaatgggctctattttttattatactatgctgaataattaactttgaggctaagtgtcacatggatttatcttttaattaaaaaagcatggttcacgcatatttgagtggtagtccaaataaatgcaatatagaaatttatgtttgtttatctaggtgttaattacctagagattgtcctggattacttctttttataaagtgtcataggctcgtgtcagaacgaataaagcttggccgtggaaccttatcaatttgctaactatagtgccggtctgacctgagcagggagggcaggggaaaactttggggcttgttatgtatacacacgcccgcattcaacccacagcaaataaaatagtcgttttagaaaatattcctaggacataaaggcacaaatatatcttcattgttttacagcctcttgtccacagctatttataaaacatgtgattatttatgcgttgggttatgagaagttcgctgggagaggctgtgaaggaggctctatcaatccagttacctggtgccctggagaggtggagggagggcttcccagtggaaactgggctgggacaggaagttggctactgtgatttgtctaacatgtgtcaacctcccggctgctcccagaaaagccagacagagggatgacaaagttgagggttagaggtcacattaaaaaaaaaaaatcatgaatgcacactgagaaagtgaaaccagaagcccctaaaaattgttcatcataccttgaggcagcccctgcctttttctttgtttacaaagtgattttggggtggcagtttcagttaaatggtttggaagaaaccgagggttttggccaaaaggttctactttaaagaaatagattttgtaagggcaagaagaattccagacagagctgggagtgtctaagttgggtgcccgcttttgttggggaagtttgtttcccttgggttttctgccttgcttgtcttctttttcctacgcaccacacctccatttttggcaatcagataccagaaaatcaatacaagtaactgcgggtccctgtgggctgcacccggctggatggactgttctcctggggttcaggaaagcctaggggagacaggcactggtattcaactgtgctcgcttctctccagctggagccgaggggagccatcgagacccctaaacagcaaactctcctaccgtggaagctctctgctgggtagggtttcattttcattttgtgtttccttcctcttggagcccgtgcgggctggtggggcggctcactgtcagctccgtgatcccgcgcttggccgcgcgcctggagaggtgcgcccgggccaggagcagagcagggcgcggcgccaggcgggggcgcccggggcctgcgtgtcgtcgcgggtgggggcgggtgtcctcgggcgcgcacccgctgcggcctccggctctggaccagcccggtggctccaagggatcaaagcgaaaaacagctttggccgcaaagggagaacgccctgagccagctcgtccctaaggactcgtcttttggcgaggaaggggacgcctaggcccgtatggggcgcgctgtggcctgggccaccgccgagggcgcgtgggtcctgcgcggcgcctgctgttcactgcattactcggacaaggatcagagcctctttatcttttaaattattaacacttaactgttttcctccccaaatcgctgcccatttcctccccaggatcactgcctttatcagaaattgggcccggcagcactggggcgtgaggtggaggcaccgctgggaggagctgggcaatcttttgtgcttgagtcatgccagatactgtgctgggtgctggggacgcggcgaggacaggagaggagggtccctgtgtcctcttgtgccccctgcccagtcacagcagaattcaacaaatgaggcgattccagagcagacagagctttagaaagtgggggtcaattaatgctcaaagaaggcccttagtgctgagctctgagaagcacttgctggctgccagcagatgccccgaagccttgttccaaaagagagacctgaaccaagaggggagtgggaggtctgggctttagaggtggtcaagcaagggaccccacagggctttggaaaagaggctattgggctggaaatgacacagaagagtccacatggccatgtgatattggaatatcagggtttttttttttaattaattaagctgaaattcacataacataaaattaactattttaaagtatacaattcagtggcatttagtacattttaagttcctattttcattaccccaaaagaaaaccccaggccaggtgcggtggctgacgcctgtaattccagcactttgggaggccgagtcaggtggatcacttgaggtcaggagttcaaaaccagcctgaccaacatggtgaaaccccgtcttttttaaaaatataaaaaacttagctgggcgttgtggtgggcacctctaatcccagatactcaagagtctgaggcaggagaatcgcttgaaccctggaggcagaggttgcagagatcacatcactgcactccagcctgggtgacagagtgagactccgtctcagaaaaatatttgaaaagaaaggaaaaccccaaacctgttcagcagttattccccattccccacttctccccagcccctggcagccaccacccagctttctgtctgtacagatttactgattctggatattttatatatgtggcatcctacattatgtgaccttctgtgtctggcttctttcactcagcatcatgtttttgtggtccagccacttggtagcatgtatcagaatggcattccttttctgttttgttttgttttttgaaacagggccatgttctctcacccaggctggagggcagtggtacatcttggctcactgcaacctccacctcctgggctcaagtcatccttccacttcagcatcctgagtaactgggactacaggtgcgtgccactacactcggctaattctttttgtttttttgtagttttttagagaaggggcttcaccatgttgcccaggctggtctcgaactcctgggctcaagcaatccacctgcttcggcctcccaaagtgctgggattacaggcatgagccactgtgcctggcctgtcattctttttatggcctgcatcagaggccctacgtgctctggccttgccaatctctccaaccacctttttctcttcccctctaggtacccaatttctttcttctttatggtagtaatcactacctggaaataccttgcttacccctttctttaactgctcatggtctaccttccttatgagaatgtaagctccctgagagcagggccctcagctgggggttgtttgtaacaaccgtgttacaaacagtgtctattaacagcacgtaggacctcaaataaatagatattgaataaataaaaattcccagcacaattttctttgataataatcactagatttttatgggaatgttgttagcttaaaaaaaaaatgggccaggcacggtggctctcctgtaatcccagcacttcaggaggctgagacgggcagattgcctgagctcaggagttcacgaccagcctgggcaatatggtgaaaccccatctctcctaaaatacaaaaagttagccgggcatggcggcgttcacctgtagtcccagctactcaggaggctgaggcaggagaatagcttgaacccgggaggcagaggtagcagtgagccgatattgcgccactgcactccaacctgggcaacagacagagactctgtttaaaaaaaaaaaaaaaaaaaaaagagctccttctgcagtcttcagaaaagtgacccccaacaaagagtaatattgactagactccacagcagaccggcagtgttttggagaacttaggcgtggtcccgtttgcctttagtatgggctgtgtctgcatgtggagggaaggcctggcaaagcaagactgacggcccccttcgcgccaggattgtctaagaccagctccctacagagggacttgtggctgcaaatgggaaacttggatccagtccaaatctactctacgaggcacatccctccttctctctgcacttcagtttcctcatctataagagaagctgtgagcatctgcagcacaggcttactgcgggcagcaagtaagaccatggaaaagtgctttccaattggaaatgcccccacacaatcgttaatgtttaaaaaaccttgtgcaccctgcccatgcccagttgtgggcagggataacagagccagcggcttggccagggtctgctgcagccaccccaggtccctctcccaacccattgaccctggccaccctccagcctgcgagcctggggtcaatgcctcctcttaatgccttgccatttcttagtttgctgactggggtgattttcggtgaggtccacataaatacttcaaaaataattcatgatgaagaggaacgcttctggaatggatgatggcacgacaaattaaacgctttgtagggccaagcgtaaattattttaatgcatgtaatagatccgcccagggagacttgagcccctctcggtcatgcctctgtgcccccagggcctggagggtggtgggagcaggtggctgggagcctgttctgctggggtgtgaatcatttccttctccaaagacctattcccccagcacttaggtcctcctaacctgaggagagaatgggaatgtgtcgatgtctggccaggcggaggcaggaaccaggagacagatgaggcagtgtaagagcatttgttagccatgacgacggcctgacccacaccctgccttccattcattgtctgcccctctggagggggagtgaggaatgctgctgtgtggcaccagacatttaaaatattttgtttcccttgaaaatgtttggcagcaagactaatgtcccagttgaggccatcaacaagccatgttttacatttggacttattttatgggagtgcgggaaggaaagagaggcgattatgtccgacaaacccattccacagaagagaatgctgagagcccagaaaagctcaagatgttgagtttccagacatagaaaataaacacacttgttatatcaaaaaggctatctatgtaatattcaccaaatgatatctaaagattgttgtggtggttccataaatactgaagtaggcttgtaatcccagaggaaagaattcattgattccagaatgtgctcccgtgacccccatggtcaggcagagcatgggaatagtgcttgtggttgttgatcagttatcgcatatctggagagaagctttcgttcactcaacatttaatgaccatgcgctagttccggggtcgtgtgcagggcattggaggtacaacaggagcaatgcatgggccctgctctcaggaaactcatgactgcttgatgacctcaggaaagactcaagtcagaaatgctgcagtaactttggccaggcaccgtggctcatacctgtaatcccagcattttgggaggccgagttgggcagatcacctgaggtcaggagttcgagaccaggctggccaacagggcgaaactccatctctacaaaaatacaaaaattagcagggtgtggtggcacatgcctgtaatgctagctgctcgggaggtgggggcatgagaatgagaatcacttgaatccagaaggcagaggttgtagtgagctgagatggcaccactgcactccagcctgggtgacagagtgagactctgtctcaaaaagaaagaaataaaaagaaagaaagaaaaagaaagaaagaaagaaagaaagaaagaaagaaagaaagagagagaaaagaaagaaagaaagaaagaaagaaagaaagaaagagctacagtaacgcatgcaatgcgaagccctgaattctgggatgagtctccttccacagattgctccttaatgtcctgtccatctgcatctgaaatcccactctcatgatcccatcacatgcatcaatgttggtgagattgcgcataagagtagtgggaatggaacatttaaaaagagcaaccccttgcaaggaaagtattatgggtgaggtaatgggccctgcatgaagaataggatttggatgtgagggggtgagagagagagagtacctgagaaggttccagaaggaagagtaaatgtgctccggaccagagatccaaaggtccctggtggcttctgcatccagcaagcaggccaggaagcctggaacctgaagcccagaatgcggggatgtgtggacagaatgtctgtgttccctgacctcaagttcatacactgtcctcacccgcaatgtgatggtaagaggcagggcctctgggggcgagtgggtcatgaaggtggacccctcatgcatgggattggtgcccttataaaacagaccccagacagctatctcacccttttttcctaccaagtgaagacaaattgagaagacagccacttgtgaaggaggaggtagaccctcaccaagactgaccgggctggcaccctgatctgacttccagcctccagaagggtaagaaatacatttctgttatttataagcccccaggctatggtactctgtgacagccgtccaaaaggacgaagccagaggttgagggataaagttcctataggcagctatgcacagggtggtcccactgtgtttcctaaatattttttattgtcatgcaggtcagggtgggactgacagattctatcactgaaagaagctagagtgacttgtggtgaactaaatcatgctctacccaaaaggactttcaaatgaaaattaacattgcaacccacagaaagaaggaagcttctgagacagttgatgattactgtctgttcctggtataaaattagcatcatctcctcagtaagccttctgtacccatccctggtcaataattattttcctctttgtaagcccaaagcacctctctctgggtaagagtgtggaactccctgtagcatgtcagggctggttgtgtttttctactcctcgactggagtgggtcatttgaaggcagcagccttggctcatttctggatccatggtgacccatgatgggagcttcttgtatgctttatgttccatgttgacaaataaatcagtgcaaaggtagagtgatgtccacagaaccagtttcaaacccagccttcctgaattttagtttaacaggactacaatttcccctatgaagttcctggaaagaaaccactcaatccactaaaaatatagttggctcctggagggcatgcttattcaaagccaacatgggcatccccatggcctcaacacagcgcctggcacctgtgcattcaatcaatgtctgcaaaatgaccacgatcgggccatagtggatgctctcaatgccctgatccacgttcctgagctcactctgaacccatctgtggcttcaccggacagttcctagccactgacagcttttctcacatgaagaaccatgggagcttcctcagctccttgcaaggaagcctggtcatgctggagattaatgcacccagggcaacattcgggcaatgggagacagcatcagcgtgtacacaccccgagactggcatttgctctgctttctcagagggcgtttgcaggacggagctccagttgtccatggtggtgacctgcccataaatgcactcaggatcaatgtccccccttccctatctcatgtccccactctctcatttctgtttcctgggattatctcttaaatgaacaatctgcacccatgtccttgtcttaccaagtgcctgctttttgtgggaacccaaactaagataggagctaaagaaatatatgaataaatgttggatgaatgaatgaatgagtgaaattatgaagagagaagaagagtctgaaagcaaaccatgcacattccaccatctccattgggctgaggccggttccaggaacagggactgacagagaaggaggctgtggctccttcccaaggtggagtccgagtcagggagggccaagtctcaatgggattgttcctggcagggccacaggagtcagggggaagcatggaaggcctctctgtccagatgcggcagtcagggctggctgcctcctcccagaacatcctccttgtggccggtatccatgcacgatcctacctggagcctaagggaacttcagcaatgaatgaaggaggcatcacccagagggcagcagtaccctctgggatggagtaagaccatggcaggctgtgttctgagccgagttctataaaaataacataaaggcccagataaccggggtgggagtggggaacatggaggagctagagctgaaagaggaaaggactgggcaccccttccagatggctccttccccgctccccacccatcctgctatgaggacagggatgaatcgaatacctgaaggcggaaacagaaggcttcaccaaagattggatggagaaagccaggcgctgctgagcgcttaacgacaaccagccttctccccagaaccggctgtgagcacagctaagaatagacctgggccaggacggtggagtctctctgtgcgagagttctctgcgggaatattctaaactccgcagtggagccggctctgcctcagccttgccgagcagggggccaagcgtgtctgagtcagttcagctgctgtaacaaagcaccgtgatcggggtagcttataaacaacagacattcatttcccacagctctggaggctagggaaaccaagggctctcttttctgattcctagagtgccatctttgtgctgtgtcttcaaatgtcagaaggagaagagatctctcaggggtccctttttataagggcactaatcccattcatgagggctctgtccttatgacctcaccatctcctaagagcccctcgtccaaataccaccctactggagattaggtttcaacatatgaatttggggtgcaaggcacaagccctcagtccatactaatgtacacgtctctacctcctcagctgtgtgcagagcaaccacctttgaaagcaaatggttcaacatctgtagcaggaaaaaaataaacaaacaaaaaaacccatcaactcctgcagtgggctcattcactttgcatccacggaatggcttaaatcactgagtatgcaccaagtgtctgtggcgtgctgtgtttgcttggtgctaaggggcacacagcggagaggacatatccctgatcttggggaacttggattgatactctttggaggaacaagagggatagatgggaaagtgaaaagaaggccaaggagagatcacgagggaatttagtttggcaagtggggagggaagctgccttggcagttcgtggggtggttggagaagtaaggaagagattgggagaagccgggcctcacaatgtgaggaggaggagagagtcgggggtgcccatagggccgaaagtagcagagatgcccaggacaccactgggcttgtgcaggtgaagccgtgggtgaacgaaccttcgagaataggctcagtggggcggaagaccaggccacgcagctgcacaagatcagcagggctgggttgagtggaagcaggaggaaaaggatggggaaggaacaggagaaataaacaggtgggctcctccaggaaactgggcatgacacggaagacgaggtgactgttgggcatctgtggaacatgaggtcacatggtggcgagtgtcccactggtcgcttggattgggtcgatctgcccggctagtggtgtcagttaccaagcacatatcacccacccgagtgttgcagctgtaaaaagaggccctgctctcacaggatgatgctgagcacatgtgggagctccagtctcttctcttgcaggaaacctataacccacccataacactgaggcatctaacttttgctaaagagttgctcctctaataaaatcctgtggtttgaataggacagaacctagggatttgactcttcagagcatgataaccaacactgcagggtgaggctcgctggtccgagtgagccagaccagtgagatgctgagacttttgagatgctgaagcctcctggtagaggggtgcagccataactttgacccagggagcactgtaggcaggcctgggggttgctcagtaatgtctctgtagctgaccacgttcactgattcaacagatgtttatggagcacttaaccatatgggaggcccagtgctggggctatggtgggagcatgtcattcatgggctctaccctaatgctcccaagcaacatcagatcaggcatggaaataaggactatgaccttgtctattcttgccttagtatttttaattaatttatttattttgagatggagtttcactcttgttgctcaggctagagtgcaatggtgagatctcagctcactgcaccctctgcctctcaggttcaagtgattctcctgcctcagcccccctagaagctgggattacaggtgcccaccaccatgcctggttaatttttgtatttttagtagagacggggttttaccatgttgtccaggctggtctcaaactcctgaccacaggtgatccacttgcctcggcctcccaaagtgctgggattataggcgtgagccactgcgtctggacctttgccttagtattttaagagtcttctctgtaatggatatttacccagagttccttcctgctcagtctcttggcggagatagagaaatagtgtttttcagcagccacatctcaaagatggtacttgtgctgtggatttccctggtttgagacctcaggcttcccactatcctctgatatagccccaaaggactaatggaaagaagcacctttttttctctctcttgtcactcagcaccttccagttggtgggatttagagactgtcatcccaaacagagtgaccacgttagggccagactgaccgacacccacaaatgtctcctgggctgaagtagctgaattctccttcctaaattctctgtttggccacttctgaccagtgctggcctcgtttccccttcgtcttttagaaatccaattttacaagctgttggtcttgagtgtggacggttgcattttattaatttgaaaaaaaatattatttctaatgactcctctagccagttcttcctcctcgcagagctactgcctgtgtagaagggggctttgtttgcactccttttattgtcagaagtgtgagcagtgggctgtgggcagtgtgaaaccgcagtgctgctgtgatgaagcatcacgcattttccttgggctgtcataagaggggaagtggtgtttgtgcctttgctgggtaattcatggggtagtatgtagtgcttttaatgatgcccaaacaactcccggtttcctgcacagaactgacctatcccacttgccactaccgtgaatgtcccattaccaagatggaaacacacccctttccttggaatgccttttcttcctttttataacaaggccattgttggctgtgggagatgtgtgtgtttgtggcaggtggttccaggcctgctctagagatggctcctcactgcccaagatgtgacaactgacccccttagcaggtgcccctccaactacttagccctcattgcccacctcccttggctgacctgatttataccattgcatgtggtcagttcagtatcctcaaagtcactgcccaagcagctctttcttgtctatgctgcttcttcctagcagtccctcaagattgggtttaggtccctcccttttcccagaagcccctagtgtctcctgtaggccccagtgggctctcctcctctaaactttcatgttctgtgtgatcctagcagcgtggctggctcagcacgtgatgacagatgggctcagctctcacctggcctcctgcactgaaagggccttggggaccaggctcttgaatcattttccttgtgcatcctaggagtgcccggtgaaggaggagtcgatgagttcctgctgtgggttgacccaattgattgagagatggataactggaccccgtggtctgtgtagttttgtgaattcggagtttctttggggtttccaaaatcagaaagggcaggagaaggatgaagcttttagcaagacagaggcagatcttcctagacgtcccctgccctgcagttgtctggtcccacatttaagatcccagaattgcggacctggagacatggggcactgaatcctgcccactggctattagtcggcgtggtttactaaatctccttgcccatgaatatggtcattgtttaactgatggctgctttctctaccaggagcgctcagcatctcaaaatggccttgcgtgagcctaacacaacaagaagtgatgcttatttttgtgtattggctttcaaggctgactggttcagaactgcattgtaattctaatggcccctactgaacacactgtcatcagagagattatgtcattgaaaacaggaataacaatggtacaatcggttaaattgtttacccttattggacaatggtcagtgacaagttcatgtgggttgatcaccttcttcttgctttcttacattggcttcccctctctatcaggtgggagtttgtgctgatagagtgtgtgtatctgcatggaagtgtgtgtatctccctgtgtgtgtctgcatggaagcatgatactgtggaaataactcggattcttttgtttgtctgacccagatttgaatcccaactctgtctcttagtaagtatgacctcagccaggttacctatgcccatctctgatgtgagggtgactgggcacctctgtagctgtattgtgaggggtggtgcattggtgaggtgtgcagggtggtggagcaggctggcacccagtgcccaggcaccccgtgttttccgtttttatggcagatggcaataatgcccgggtgtgcgggagcagtgataatggatgttctcggcctttcggttcactgcagtgttcccctaaagtagatcattattctgtatggaataaatagtgttatcgggctgatatgcttaaggctaatgagcccatgtctagcatctgagaagccagataacaagacatgtttttctccattggcttctattgatgtattaattaatgaaatccaagattcccctttgagctggaagagtgtttaaatcactcttgagctgtacacagcactgtctccctcttgctcccagatgctggagaggccagggaaaggcaacagggtcttctgcctctggcctggcccaagcggggcaggaggaggtatagacatgaagtctgcaccagacatcccaggcttgtctcagtcccagtgcaggccacatcacagctgcaggggctctgcaagcccctcctccatcatcagccctgggggaccagctccggcagcctggtggccccgggcccaggcttgctcttggtctaagcatctgctccagttcacattttacctcctttgggatttctgtcttccaaagggccccaggacacaacactgaaattcactgtgtttataccaactcaaaacctgcccacaaaggaggttgtgtcatttcagtcctgggcaaggcttttgtacccatgtggtaggttggtgggttttgagtgaccatctccttttgcaagtagcagcatggaaaaggtcacagtgttgatattagacacgcttgtgttctaggccccatgccagcactgagtagctgcttgagcttagtcaatttgtggaaattctccgagcctcagtttcctggtctgtgaaatggggattatgaacatatggagcccaaagcgctgttgtgaggactacatgaactagcatgagtaaaagaattccaggaataaggcctgcaagaatagattatcaaggaggcagggatgattcttattgtaacaatgatcatacatctattaaatatggaatggggggctaagattgctcaaaaggtctttctcacaaaagtgaaattgcattatttttcataccttccagtaactagcttttctaatactctggtgagaaaatatccttaaaaatctgcttcaatatttaaaattggtgtgattagcaccttgttttccatactaagggagaagggcatctgagaaaaagttgtcagaagtggcgtatacatctctccaccaccttgctggagccataacgtgtgccttggcacccggaactaaccacagacttcctgcactccttccataaccacatacctcacatcctatagatagccatctagcctgcaacccataagtaacttaagccccaacatcctaaaggtaaccatgtacctctgcaccccatcagtaaccatgcacttcacatcttacaggtgaccatctaccccacactccgttagtaacctgagccccaacatcctaaaggtaaccatgtatccctgtaccccatgggtaaccatgcacctcacatcctatggataaccatgtactctgcaccccataagtaacctgagcctcacatcctaaaggtaaccacgcacccttgcatcccatagataaccatgcacctcacatcctatagctaatcatctaccctgcaccctataggtgacctgaacccccgcatcctaaagataatcatgcacctcacatcctatggatagccatctaccctgcaccctataagtaaccttagcccccacatcctaaaggtaaccatgtacccctgcaccccatagataacaggtacccttgcaccctaaaagtaacctatactctcagactataggtaaccatgtattccagaatcctttaggaaaccatatacttcacatcctataggcaaccatgtacccctgcaccccataagtaacttgtacccctgcatcttcaaggtaatcatgtaccctgcaccctgcaccccacgtacccacacacacaaggccaagcctgcagagtggagtaaagttgcctcttcagtctgtgttgtctcacatgcaacattcccacgtgctgttgccccctccagcctgaaggaggaaggcagcctcagaaggcttcttattcgggcccacctttgctcctccctgggagcatggcaggtgtcctgctctggtctggatcatacagccatgaccatcacacctcaccctgggacgcatgtgctgcacgtctttgccttccatggtgaacctctgagtctctctccctgatactgctattggcagtaggcagcctgcacaccctgccaggacaccatggtgattagcatcggtcagtattcaccaccgtggaccccaaaacttctttctcttctgcatttcgtatcggtacacttaatgttttacaactcacattctactctatttagaatcaatagccactcagaattaaaattcgagccgaactataaaccataaaagcccttgattatttcattagtaatttactaattggcattagatatttaattacacattccaaatatttgatgaattattttagctctgcatagaaagccagtgatagggactatatttttcaggaaacaaaaaacccagagagatgccgcgcgggaagggttagtgtctatgcgtgtctgaagccggaacaactggtggaaggatttgccttttctttgaaggaggccacccagacagccattgagtccagcttggtatccagtgacccaagcctgtttctctcccgtctttgttcaacaacacggctttctgttcccccttttcttttggagacgttatcttttctgctttgatctgcttcccacaacataaggtgatttctcttcttatcctcctgatgggctgtgttttgacatggataaaaaggagtcagcctctcacctcccgtcactcgctctcacccagtcccttgtcctcccaattcatctcgcagcaggccctgtctgcatcggacaccagatggcccccacagccttcttagaatagatttgcattagataccactcggtctctggctccctttcttaaggtgtgggagctgtttctctagaaggaaaaaaaaaaaaagataatttcagtacaagaaaaaaaaaacgcacaaatgttcatttctgtttcttcagggatctttctgatgataagtgggcactgaattcacgcagccccagaagtgccttctacctctctcttcactgtgcccaggaccccatctactgggcacccacctatggaccaacatctccgtgggacaattcaacaaatatgcgggaagatgtacattgaaagatgggtgtttgttcttaatctgcctggctctccatagacatcagcttgtctatctgttgtgggggtggcctgagagctgaactggacccaaaaaagcaaaacagcacagctactcacgcactatgctcaccctgggccagacccgggggagagcaaaatatatttctcactgattctcacactgaatcctctgttattctcataacagattgtggcaggccatatgtggaacttccgttgaccattccagggaagcccagggagggtgaatggatgatacagaagagaaggctgcatcccggtcacaaacctgcaatacaaatcagaaggaagaagttagcccttaaagggccagccgagccccagtgctgtgccatgaaaggcatattgtcaggaattacaacatggacccaacggcccttatttggaagatgcaaatgcaagtctcctgccagacagacttgctcctaagtaagagtagccatttgggatgcctgtgcaggagggtgcaatggaagcttgaagaccaaggaatccttttgtgtctgtccacgaacactctaggaaggaagtgggaggcatgaagagaatttgctaccagcacaccctctccagcttagctcagcttttaattggatctttttatttttttcttttgagatggagtcttcctctgtcgcccaggctggagtgcagtggcacaatctctgctcactgcaacctctgcctcctgggttcaagcgattttcctgcctcagcctcccgagtagctgggactacaggtgcccaacaccatgcctggctaatttttgtatttttagtagagatgaggtttcactatgttgtccaggctagtctcaaattcctgaccccaagtgacttgccggccttggcttcccaaagtgctggaattataggcatgagccactgcgcccggccataattggatcttgagccatcacttaacttagctgtaaaatggagacagtgtgccccacccatctcatgatagagggaggatcactgaagacaaggtcttgggaaagtcccagcaccaaacctcaggaagggctggcaggtggaggaggagaatgattgtgtttcaccgagccattagctttactcctccttctctggcttctgagctttagaatttatctgtattttaaccagcctgtataaatagatataccaggttttatgagaggctgcctcaaatccctttggaaatagggtgggtataaaataaaaaccaatacagtaatttctcaagagaaatctagctgcgatgatcaacatcaaggagtgcctttgtttctctctggacttggagccactttgaaataatgaggcttccagaagcaggaagtttgtcctgtccttgaacccccagggtgcatgttctggggaaaggagaaggttcaagtctccacgcaaaggatttcaggcatgttccccatggtgctgaggtggacctctaagccctggcctcctctgtcccagcctctatcacactgcagccccagagcaccccctccactcaccaccagggcgtcctccccttgacctgctcacccctctttctggtcagcttaatcatttccaccactcccaagacctctggaccaatcagctcttcaccaggtcaagatcaatgtttaacaactgaataaaagagggaatcccatcgtttaattggaaacaaagaatggattgtagaaagatctttatcatctgggtaaatttcgaagtcaaggtgtgacagttctgattaactgattaagctgattcacttcgcctggcttgcttgtctccccaccctctgcttgcaatcctacaagacctttagggcccactgcagggctggtacaggaagcctttacaggtcccttgcagaatgccccctaaggttatctgtctcttatccctggggcactcagcacctctcttgggtttagctgtgtctggtctccttccttccagggagctgaccatcctgttgctgctgttacctgctctgggtgcctctgtgtttatttcacagtgtaagacctggcatagattaggtgctcaatgactattttgtttgtgaattggtggatagatgacataaactgcagacgcgttcttggacagctggaaagggaggagacccttgggatttggaatgccactgactgccctgtacagagagcactgtgaggctggtgtcatacaagtgtccaacatcaaggattttgcccctagactcagaaagggtgtggaaaaaagcagcaggaagagaggcagggatgaatgaacttctcctgggcaggacaaggagaggagtcctcattgactgagggtcagagaagctgcggccctcagggctggctttcaatttggacacaggatcagagtgatgggggctggcatggccagggatgggagggatgtcaggggctgccaccccaggccaaacgccacccaaagagactctttacatagagagacttgtgtatttacctttagggtctttgagcttgtgaaatgcttttctacttggaagacacaaggtagaaaagcagccgcttagaattggagcaaaagagatcttgggagcacaggtgggggacgggagagaacagaggaggaggtgagtcttcagaggggacatttccatgggccctgattgtacgtgcccagcagacttcaaccaaaatgcctggttccagccaggtgtggtggctcatgcctgtaatcccagcactttgggaggctgaggtgggcagatcacttaaggtgagaagttcaagaccagcctggtcaacatggtgaaacctagtctctactaaaaatacaaaaattagctgggcatggtggtaggcgcctataatcccagctacttgggagattgaggcacaagaatcacttgaacctgggaggccgaggcttcagacactcaatgagctgagattgtgccactgtactccagcctggggaacagagcaagactctacctcaaaaaaaaaaaaaaaaaaaaaaaagagagagagagagagaaacctcgaaatgcctgaatgcctggttccagatcgcctcagtgggtagagacccaaataaataggaaccacccagttttttcctagggcataggcgcaattgctgtgtttggattttttttattttattttagacctagggtcttaccactcagtctggagtgcaatggcgtgatctcaactcactgcagcctcaacttcccaggctcaggtgatcctcttgcctcgccctcccaggtagctgggactacaggtgcacaccaacacactggtgtccttcttttgttaggatgggatctcactatgttgcgcaggctggttttgagctcctgggctcaggcgaccccgacctcggcctcccaaagtgctggggttacaggtatgagccactgtccctggtgatttagggaatcttaagagacaggagtgtatcatatttcctgggtcttgctacctagtgtttgagccaaacatgcatagacccaacccactgcccacacatgtatatacccatgcacatatgacccgaggttgtgtaggagatgagaggctgtgatgtagcctggcccttacacaaccctccctgtgtgcctccctcccacacataggtcctcctgaaccctgggagagttggccgctgtgccaggggtccctgcccccatggagctgagagcctagtgggagagacacacacccaatcaaataatcagatgcacaccagtcaccaggaaaggtgacattttctaggaaggaaagcaaaggcatttggctgagggggacagataatgggatatcacttgactcagttttggagaggtcagagcatgccttacttgccttattttgataaaacaggaaaaaaatatttaaaagcaaaagggactgaggccatttgtgccttctaaggatgcctatttgtaggggatggggaggagcaattcacctccatcaggaaatagctgtcctttgtccttgggggctgaaatttggagaactggcctggtgagggctcaggctgctgaatttaagaataggttcttgcacctgcacatggagtctggggtctgaacaacaggggataacttgctttgcataataaagtgctagaagttagatgtgcatctatttatttgagttgctggggtatcagatggagatagagagaggagagaggtgtccagtaataaggggaagggtgaagtccaaatttgtggaaaggatgagagaattttaaagaagagagctctctatcactcagttttattttactttactttattttatttaattaatttattttttgagtcagggtctagctgtgtcacccaggctggagtgcagtggtacactctcagctcactgaaacctccacctcccaggttcaagtgattctcctgcctcagactcccgagtagctgggattacaggcatgtgccaccatgcccagctaatttttaaattttttttaagtaaaggtgaggtttctccatgtcagccaggccggtctcgaactcctgacctcaggtgatccacccacctcggcctcccaaagtgctgggattacaggtgtgagtcatcgcgcccagccagaggtatcactcagttttaaattgtctgctgtgtggaagtgcccctgctgctgccccctcctcacccacaagcctgttactcttgagtcattagcaaggtcctctaccaagctgcccccagtaagtgcaactttagatgagaggtgaaaggaagttgaagagaaacagggttaggctgacggcagcggtggggttgaattaaagacagcagatgctcctgaatttgcccagagctggaagtcagagccctaggccctgggactcttgggaaggagtttggattcaccccaggtcacgaggtgaggattggagctgctattgacttgacatctggattacattaaggccgagaactgggatggagaacctctttatctgattatttggtactaacattagtcagattttaagggggaaaaaaatcagaattataggattgttacaaacaaagcctttcattaaatctgagtatgctggataactgacgctaatggctacagagtgtggacaagtgggtgtcctgctgaacctgcactcctgaaggaccgagggccttttgggacgaggggggacctgccgacacccagggtaggtctgagacacttgaaaactgctgatcttaaaaggttctagaaatggtgtcccacagtgtctgttcacagagcccacactcagcacatcttttgcgcacaggcggagcaaggtacagtctgcctggtccttgtctgaatttctacttattcacactatttaggagcaaatgaataaagcctcctgtatcaggaatttcatagccccaaatcaacttggggaatccatcatgggcaaaggttgcagctgcacctcaacgtagtacctttgcaagaggaacccttgctccttcagccccctttggagtgcatagacagaatctgcctttgaaagggcgtgccctggagcactggagggatgatttagggtgagtgtttctataggtttctcaacagcggcactgttgacgctaggggcctgatgacattttgtcctggaggttgccctgcgagcattgtaggaagttcagctgcccctcggctgacacccatagatgctagtggcactcccacccctccaaggtgcgacaaccaaaaatgtctctggacactgcccgctattcccgggacacagatttgcccctagttgagaatcattgatctatcggaggcaatttgcaggcacctgccctcaaagagcataaaatctgtgattaaaggcaaaacccgtgctgagggcagaggccactgcatcaaaggaagccggggagggaaaagcccaccttcatggtcgctaataactctcctcgtaatttcaattccggcgagtcctttctgctttcttcttttctaagaactatatttctgaggtcccaagtgacacattggactcattaaggcttcttaattcccacatgaattattgctggaagggtctgaaggcccagtatctcgccttattacacctgtagttatgagcagtaactatggcctttattacaacattcagcaccagctattaaatgtgaggcatgaaaatgattatttcacccccaaatccacttaccactggcacatttccacgcatgttctcataccaaaccgaggagcattctgccgacgaccctgccaaatgccgagacctctctgtggggatgcccgatttgctgaggttgcctgtcaatcattcttcattactgtttatagagtccaatttcaagatttccttaggtgttggcattagctaatatttcaataaataaagcaaaagctagtgctgtcactctttcccatttcaccaaaggatttttctttccctacagaaaatcagtagggctaaaacattccttgtttagcttggggctaaacacaccctacatgaagcagaaaaaatcatctaattttttcaatgaaagcctatgccagtcaaagacattcttacctactcacacttaagaggcatcaaaaatgtacaaatattagaatcctcggcctccacaggcaagttgccatgtacacaattatgaaagggaaccaaattaagagggaatgtgcagaacgcctttgaaatatcgaagaaaccgtgaacgctgcttcattttaatgtcttagatttcaccgataatgaggaaattgtcctcgttttcatgggtagaggttcttaaaggttttaaaatctgaatagtaatgctgctcaattgtgcagattataaataacttttgacaaatccagtgccttccattttgagtccactgttgaaaatacagagagcaagtgggaaacagagagagagtccaggggttgcataggataccattcaaagaagggaagaaagagaggcatcctggtaacaaactctttctctcccaagaaagagttaacagaaagaaataaaatcagatatgtgtagcctccagacgtccattaaagtgcagaatgctgttttctatcacagattatatgccagatgttcaaactatctctaatcattgcagatgtaatggagtagaatgttgcagtttgtgagtttactggcattaatcctatatactgcacaagggaaaagattttaaatatataattatatctcattaatactcaggttttatttcctttcaatggaacaggacttattaaagcaaccatttaccgcatgttttctttcagtatttggctccagcataatcctgtgtgcatttgacgtgtaaatatgtactaacctgggtgcagaaaaacacccaggaatggctgtgagtccaccgctaccaaaatttgcttttataagcatgagatgtttttatattgtaaattgataagagagacttaaccgcatactttctgagtcgctactcgggttttcttcatgttggaaatatttgtgtttcttcatttgaaaggaaattgccttcacttcggctctttattgcacgtggggaaaaggtgcattctggctccagagggggcctgtgcaggtacgggtgagggccggaacccctgagtggcacctacattctcttgggcacttgtgggacccactaaaggactaagaaagttgtgtggttgttgttgttgtgtttttactgagcatcaccatggttagggtgtatctcaaggggaatgcaggagtgaggagtaaagaaattccttcttgagcctccctggccactcttccctaaataaaatagcaaccttttcaccaaccatctaaactgggttggagtaatgaatactaacaccaagccatctcccgggctgatggccagcttcctccgtggctggagcacattcacagaagcctctctggatcctttctgtggagccggagctgtccctgcatccttccccgtgagcggggaatccatgctgtcccaggggttgagttcctttgctggctgaggctggccctgtggacggatggatacacccaccgctagatgggagacacgggagcttgcttcctgataaggacagaggctgaattttcggcaatctgctctttctcgcgactctgggttcaatggctgtgacttatttggtgattctggtaacagactcctcaagcgcaggggctgcatccaccttgctccctgatttcccccacaccagtacagtgcctgacacctcatcagctctctccttacctctttcttaagtgacagaataaaagaataaattactgggtagtgaaggtcttttgggaaaagctgggtggggcttacaatttagtacaatgtccttagctatcatttttggcgtggaagagagtttgatggattctgcaataatgagattgacgagacagatggtcgctgccaggaattcagcagaggccagggtgatggagaagcaacggctctgtgtcagaagcaggggcgggagcgggaggtgttggaagctcagtggtggtttcatacccctggggaagaagcgatctgcaggccgggtggtgaatgggatgcatgcaagcctgaaacgggagtgctgagctcacaaagcagagtcatctgggatatttgggtggaagctctggggcgccagggaaagtcccaaaggagggttctgggaagagggtgctgcagacagcaataagaggaggagattggaaggaggggcaaagcagttcatggggatccctggaactgagtccagctcatccaaagcttctatcttctgcttttattttataatatttaagttataagtggatgctgccaattaggtatacagatatacagcctctctctctctcttcctcctctccttccttcttcctcctctccttccctcttcctcctctccttcccctttccttttaggacactaagatcaacaggaataaaattcctgagtatttatctcctgaggggcagagctagaaagaggagatctatgcagagtttccaatttagaattatattaaatggggtgggggaagctgagtgttaatgtccttttcctttttgggatttgagtcctctgggagccaggactcagagagcagtaggcgtggggcctgggctgcagaggcagctaggggctggagcaagtgccccagggaaggagggccaggctgagcatgggtgagagacctgagagcccaggacaggccacttccaatggggaagaccccggtgctcccggctgcccccagggccagtggccagtctccgaggggcctaagagctggaggaaaagggctgtcaagtccggagggcaggagctgggctggggtgaggggaggtggcagatgaggggtccatttaggaacaaggccctgctgatatggaggaaacagaaagaaggtgagagtcagcacggtcgcttcaaaatggtgacaactgaaatcttctactcaacaggaatggaaaaccaggtaggaatagaaacctggaagagccagatgaccagaaaagagcacttatgcattttggaaaaggacgataacctcgtaccactaaaaagttaactgaaaaaatgttttaatttcaatggtttttggggtacaggtggttttcagttacatgaacaagttctgtagtggtgatttctgagattttggtgcacccgtcgtcacccaagcagtgtacactgtacccaacatgtattcttttatccctcaccacccccaaccatcccttccgagcccccaaagtccattatatcattcaaaaagttagctttctagggaaccttctctgttcgcacatctgtctccaatacaggactgtttgctctgaatgggagatctgtcttttagtgaatgtttgccgaatgcaagaagaaagcacaaagtgaatgaaataatagataattgatcaaaatggatatgtggcaagggtcatcacagaggactacacaagtgaaactcaactatccttaagagttttaaaagatgtgacatgttaggttgcctgtggggaacccatgaatcggcaataaggaataggaagctcagtccaaatagttgttgaggatcattggtgggtgatggggcacatggctgcaatcaccttcacgcaggtggtcctgaggaagttaccttgccctgaggcaagcagggattatcccgaggggagactatcacctgcagctagatgctgggttccaattcctcggaggggcaaagagatccgacaaaagctcagtgctcagggcccggtgcaggtcaggcaactcttgctgctgactgagcaatgcagtcccccttcacaattaggggtgggcatggtttgttgttctgggcacagtgaaaattacctattagcagcacagaatcttctggaaggcctcatggaagcatatccggattgaactttctgtccagatcagcctaaggacactgtctcccgtgtcatggggaccactcactgtacgctgcactgaactcactgttttttggcttcctagagtttggggtctgatgctcacagcttggctgtcaggcctccactgcatgtaagtgttcacagatgcacctctttggccaagctctggaattccctcctgctctgcactggaaacggacagtgtgtctgcctctgtctctctcttcctagactctcagcccctccaggctggggttctgcagcctaggagcatgggctctggagcctgcctgcctatgtttgcaaacagagcccatgctttcctcactccaggaccatggacacaccttggtttcctcatctgttaagcaggatggagttgttttcaggaggaaatgaacgtgcaaccatagagtgctcagaaaggtgtctggctctgtaagtgttgcaggtatggttccccaggaaacaggccctgagaagggggctcacatgcaggaggtgtattaggaggttccctgggaatcaacacctccatgaaggaaggggaaggaaagaggactggacagagggagatgtcaagctgctgcatcagcctaacaatatccacggcctgtccctgcagggaggtctagagtgagattagctctgcagaattgcccagagctgggctgagatggcaggctttcatgcttctttgtcagtcaggcactggatgtggtgtgatgttggttgaggcagctctctgcagtaaagaccatcctgggaggaactgacagctgaggccatccgctgaactcccagaagcagacgtaacaagtccttccttggaagggacctggatagtgagtcatgctgtccaccaccatcttctctttggctgttcagatccacttcttcatatgcatggaggtagcgccatccccgggattcccatgggtctctcttcctgagggaaactctagaagaggaagattcatggagtgaactccagcccccactgctgccgctggtcttagggtcctgactgatcctcaccatctgctttctccatgattaattctctattttcattagcaccggtgccagtctcaatggcttacttgaagtcatcacccatacctttgcccataaagggtttgagggtttgagtttctggtgactatacttttctcaggtcaaggttggtgcatttgtccatttgataccacaatggagcaaagaaatgccacccaggtaagtgccctgttagaggagtgaaacagctttgttgtcaggggtaatacccgaggttccttgccttgtaccagacacatgtggagtgaggctaagagcagcggtttaataggtgaaagaaagagaaaagagaatagctgcctctcctgcagagagagagaggggagcccaagtaggtcttccgcttttgtggtgaagtgcacggggttttatagactggcttgaggaggtggtttccgatttacatagggcccaaagattggctggaccaggtgtgacatttacatagcacatgaagaagctagataccccaccctaaccttctcttgtgcaaattgattctttacctggccagtgccatgatgtctgcccttgctgtacatgtggttgacaaagcaaagggaacatggggccgccatgtcgaacatgcctaacccccaggtagccttttcctattgtcacagctgccggcattcactcctgcaagcttccagcttgcttatctatgtttgcagctcaattttacagactgctttttgttaaaaaagaaatgatgtgaggcctgttttttattaaaagggaaacctgaccaaggacttccttaccgtcactatctgcctaaataatttctttttaactcctatatcgggggactgaagggagactggtaatcattagagtcccaagtagcaggagaaggaggcatggcaggggattttctgcggctttcacagggagaaatgtgcaagtggcataagcaggatcaacaagcttaggattggcaactttgaataattttggcagactccaaggaacagggactgtcctgagttgtctggttccttgtcctggggaaattaggggagggaaatattggccgtggagcataagagacctgtgagagcccagtaaaagagatggttggggagtatgagctttggattggttggttcatagccctaggagagacaatcacttcctggtcaggtctcaagatgtcaaagcatcacaaaatacagaaacttaaatatagaattcatttccttgcaggcccctgaccatctggtctgggccattgcccatgagttcatacatactctaacctcaggctacttctttgttcatacaaagtgcatgaccaggcacaacacctaaagcatacccattgagaagttttctttcccctctgcctttccaagtcattcctgggtactgggtagtaatgcagctgctatctattgttatctttaatccacacactgagctcacccatctgtgaaccaaatctgatctttttcctcttgtctgaagaccataaggtatcctgaaagtcatagggtgtgctcagggagagtagtgggtatcagagtgtgaatgtgaatgatatggagctcaaagctgcctgctcatgcaacctgcctgtgccccctggctctgctgtgcttggtcccagattagccactttaatcctccatggattattgctgggttacctgatattgttatgtgtgacagaacacaactcatgatgggtcctctctcttggggccccatggtcaggcactccttctttatcaggtcttggtggctacactgggaggtatttttccaaaggcacattctctgctgtggaaggtatggccttgatccaaaaccctaggggtctacattgtgagtcttcctttgggatttgttttaaaactccacatgacatcatttccttcactgacaatttttatgctttggggtctgccagatcataggtccatctgcatcacaggctggacctgctacagagctcttttctcttctgggcctcatacaaaaccagcagcttttcatattacctggcgtataggtgacaacagtatttccacatgtggaaaatgctgcctctagaatccagagtctagaaccagatgtcatgctccatcctttatgatgggagctcataatttatcttttactatggaagggatgtactgtcatgcctttgaccactgaactcctaagaatgttagtgatgtagccgactcctttgaatctttgaaggagttcttttctcaccctctgcaatgcatgtgtcttgtcaaagcctctgtcttagtgagttcaggctgctataacaaaagtaccacagacggggtgactaaagcaacagaaatttattactcatagttatggaggcttggaagtccaagatccaggtgctgactaatatggtttttagtgaggtcccttttcctggtttgcaggtggatgcctttttgctatttcttcccatggtggagagagagtgagcagtctctaatctctttatttctttataaggacaccaatccccctcatggggactctactttcatgacctcatctaaacctaatagccttccaaaagtctttcaagatgtcctcatggctcaggtcactttaaccatattatgacagagggagggaacgctaacatagttcttgggaaatcctgtgaatgtacacctttgctcatcccagaactgtttctgatcctttcttattgtgatagaaacaaaaatgcactcactagatcaaaggctgcccaccatgttcttgagagcatgtgaatcagctctaaggaagatattataactgatatggaagtctcaattggggtaactgcttggttaggtatgaaaagtccactgccattttccaggatccatctggtttttgcaggtctagaccagtgagctaaatggagatgtgatgggagccaccacacatgcatcctttagatctttaaaaagagcactaatttctgccatctccctgggacacaacattattattttctaccttgatttggggaatgggcccagtcaaggactcaatttttcagtatatctatgctaacatccattagaggactggaaacattaccaccaaagtgtctatgagtccagtggagcctccatgaagcagcctggccaggactccaatgattatatatctcccttctaactccctttgacaggggactgtgataattctttgggtctctaggtattggtgtctattcaaactctgtgtccaccagtcttcacgatgtttggatgtttcccttgccctagtccacagtgcaatgccctctgggaaaggactcagaattatgactgggtccatgtgccatggtattacaagaacttcccttgggggctataacttcagctgcattcaacaggctccaggtctgaaaagtgcacgagcagtcctggctttttcttgcagcagctgctctcagtcttctaaccagcagtctttgatttcttttgacggtacaaattgagcagtactcttgttgactactcttctattttgccccacactgtgttctattaaccatctccatgtctctttgcagatcagatcccctggctgcttctctaaccttgctacttatgacagtaattgcatcctcttggcttctgaaaatcaaaggccgcattgtattcttcctctgctctttcagtgttccatcatctccattgccattggtgagtccagttctgtaacagcctccttttccaccagctttggtccacagaagagagttgccattgaacttggtagtgatgtcagtgcttctctcgccagtgtattcccattggccttagtgaatggtatgctctccaagagttgccatggactgtgatgtgttttcagccgtatggagcatatccacaccagcatacctacttttgccatctttcaaattttttcttaacatttgctatggcaattctgacatttcaaccccatttgcttcttccacactcctagaagccatcttactatcacatctctccattttctgggattcttgccaaggtgttaaatcctgaattctcaaagagtgcactcaaactctttctaattcagtctgttgttttgttacagcctggcaggttcttctttcctgctgcccagaaaaagccaatatgttgagaacagcaggtgctgcagcagagaaagagtttaataattgcagggcagccatgcaaggaagacaggagatatttctcaaatccacctccctgagaattcagaagttgggattttaaagggttctttggtggacagggctttagggaattgaaacaattgatctgctggagatgaaatcacaggggtgtcgaagctacaactgagtcagctcctggctgggttttgcaggaccagttgcatcagttttttggtgtgggtcatgggtccaagtgacatctcttggtctaccaaaatgctaaatctaaaaaatatctcaaagaccagttctttaggtctcacaatggtgatgttatctataggaacagttggggaagtcacaaattttgtgacctccagttatgtgagcctgctgcagtaggcaactaaagaaaagcaagttaagtcaggaatggatggttattggttaactgtgtctattctttagcacagttcagacccctaccagaaatcttaaccttgttgtcttttattagcctttacaaatacagtttcagtctttgaacaaggaggaagtcagttcaagaaaaaaacaagtactgacaaaagcaagttagcttgtagtggtagaagcagaatagaatcagttatgttagatttcccttactactataattcctgcaaagatggcttcagtttcagtccccttggtcaagcactttcagtatctaattctgtatctaatgtcctggctgcaggtggtacctgctggacaggtcttgcagtacctctatggcatgagcactccatcctttttcattcccagcatgaccccagctgtgttttgttgtgatttcatcttagtgtgggagcaggcaagtggaggaaaatgttgagtggcatgtatctcatgatctgggaaaagcctctgcattgccttcaagcaagggaaggagttacctcttaagagggaagggtgacccatttctgcaagtccagaaggctctggggagcctggggatttaagatttcccaaggcattaattcagatgtctgcagcccagtgtcagggtccatttgtttctcaactagggccttgatgttggcatggcagacctgcctggattggggattgagagtctaacctttggagctcagctgctctgatgacaccattctaggcctgatcctcagctctctgtaccctcctactgtaagagatgaggacctttgatttccaaagatgcccactgacttttaattggtgattatttgctcttatctttttattatcttttcccagataacaatccagcttagctggattccatgtttcatttagttacatttcctccatatttctaactacctgataaatctcaccagcaaacacacccccttgaatgaacacaccatccttatcagcatctgtgagagttttaacaaatggactaacacctatcatatgatgggagccttattgtcagtggagtagtgattgaatcatccagcttcaaaatctcgcctcagggcttgctttttcttggactgcatctgtttctagttgccacagtttgggttttctagaaagaagacactgatacaaagtttagcatgcatcttgtttcattggagctgctataagaaaattccatggactgggcagcttataaacaacgaaaatttagttctcatagttctggaggctggaagtccaagatcaaggtgctggcagatttgttgtctggtgagagttcacctccttgttcatagacagctgtcttcttgctgtagaagggttccacttgcatgaccacatctagtcttaatcacctcccccaaattccatctcctaatatcatcacattgggtggtagggtttcaacatatgaattttaggggcacacagttatttagtccataacagcgcatttcatgtttatgaaggtatgcacttggcctcaatacctgtgattaagccacgggattcatcaagatgcaatgcaggctcagtgacagcctacggggagctctagagctggaagaccccttaagagccgagccaaggtggccaggcctttttacccctggggtcatcagtcgttgaatgggagatgcccaggaagaagcatgaccttgggtgaggtggcattccatagataacacgattcctaagagagctgacagttcatggccagctgatgcactcttagcatctggggccacagatactacattaaagggaaatctgagaaacacatcacagtgtcccccacaatacaggttatgattgctttgtattctctctcataataccccttcataaacatgaagcatgctgctatggactaaacaattgtgtctccctaaaatccatatgttgaaaccctattgcctaatgtgatggtattaggaggtggattttggggaggtgattaggattatgtgtatcagtttttctctcccagcccctaagacagcagacaacacataaataataaatattgttgaataaatagaactgcacaaaatatttctggaacatcctttacagaaactggttctctgcagagtatctgttggagccactgatatgtgggagtgactgatgaacagagaatttgagggccaacaggtcaggcaattctgatcctgttgcctggcttgttccttctcagcaaggtggtcatggcaggctcacatggggatgcaagctgacaactggtgtgggtgagtggccaaggttggagcgttggagtggaggtgatgtggaacaagatgtctggatgtattggagcaggcattgcattgcatgcacacttggcccacacaataaatgggaaacatccctgtttctagcaaacaaaagttgaccgttctgcagtagaagcaagtcaagaagcagatcccaccgagataggactccaacatttaaataacctgttaaatggctttcattgccaataatctgatttgcactcaggcaagacaagttggatgcctcaaatgtgtcaatatgcaacaagaagataaggaagagaattaggttcaccacccaggctttcactttccatccttcattttcttggcaagattgctaaatagttttatatggaaccagaaattgctgcctaatgctaattcgtgaatgatacaatcagtgctgaggtaaatggtatagagaattgatactggaataaattgggatgcatccctttaaataacaatatcaacaaattttggcacaaagggcaggggtctttgttgagcaacaatactatccccgagagctgaagcttggttggagagagacaggcatctggaagcggaggcgggcttgcaccctggctcctctacctgccagccctgtgaccttggcaaagtcctttacttctctcagcctttatttctgtaagatgagtaataaatgtcacagttgttatgaggataacatgagaaattgcatttagaacacttgacacagtacttggcacagaacaaccgagaaatactagctgttattatttattatgattgcttatctcccacctgaagtgctgaacactgacccccagggaaggtggagttgggggcagtcttagaggggtaagttacatctccaagtgtttccagctcattgcatggaaatccattatgcattgggccctctgagattctgaggatgggtaggaaacctgagcatcagggcactctccttcttgagggatggttgtggttacaatcccaggaaaccccatcaaaacctttttgcagttttgggaaaaccttgtgttcttattgaactttcgtaagcccacaggctgctccctgcctcccaaaggcacaacccaccacaggccaggaatttctctaagacagggagctttcctgatacaactttaggccctgggccttacactgcaaagcagtgctgagccattttccatgtagacgctctgaggatgggaagctctatatctgcctttgcaataggggaagcttctctctgccaaatcctgtcaagcacttcaggagtcatattctatttttgtggcatcatcacctgactactttattttctgattagtctgtgagttcctggagggtggaggcagtatcttgttcatgttttagtggccagcatggtgcctaggatggggcaaggactcaggaaagatctgctggatattctgtttctgggaagaaaattctggcatgatacgtagcattgatgggctaccatatcaggccacgagaggaaattagggttaataggtttcgcactgccccattacctcctctttccatatagtcatttgggtgcctcaagtcttccagatggctctgttgggttggttcctgttaaatattggtgctttttgaactctgagatgaccaaggtattttaagaaagaggttgtctcggggaagagctttttagaaggcattgtgacactctgtagagaacagtccagccctaaaataacacttaaaaatggctacgagcattacccctgtgtttagataaattctcctgaggagctttgttctccaacagactgagtttttggttgctattggttttaagatgcttatttcagtagcaaaagtcacccttggctacttgtgcagaacattgcatgtctttttatcattgttactgttattttaagcacatagtgatatatatatatatatatctccaaagttttgctttggatgagaaaagggtaagataccaacaaggactagaggtaattaaatgggtcttcaggaggatcatggccagagaccagggcttgcccagcctggccttcctcagccctccgcctctggtttcagtgtctccaccctggctgatcttgggtctttgtctgtgtgtggctttggattttcttactcttctcattcctgcttggaaactcctctttcttagtgccctcaggttacctcctccatggagattactgaatactgaattatgtgaatagctgaaaacatgctctattggcatatcaggtggccccagctcactgaaatgcaaggatggtcttgggggtcccagcatttagaaatggagggagtcttggtgttagaagtgattcttcatgggttgaaggagggggagtaattctgcaatactttgtggttcaaccttttgaccatctcgacgtcatgtttaacataagaaattgagtagcaccagttactagtggccactggaatcagagaccttctgatccaggaaattgattttatccattcatctttagttgaactggatccaaatggtggctggtaatagtcattttaacatgttgaaatattatttctaaaatagtcattcaacacaacctgtctggaagttttctggagaacagatatttttggaatccttttgacagccgggccaacacaattgtggtagagaatgactaatgagtagtcactgtatctcttagccccactgtttgcgagcaagccttattgagtgtgtactggctactgggcatgattttgtagtggatcagccctgctgactcccgacgcgtgagaaggctgtggatgttgaaggctatcccaggtaaacagataccagttgctccttaaccagagccctctcaacggctacgccaaccaaagggaatgtagagtcaagcatgaacccaggcagaaattgttgtgcatgagcttgccaaaagtgcttgattaaaaaaaaaaaaaaaaacctctgtgaaagaaaaatagaatctcaggaccccgaactcacaatgccaaaaggaaagttaagtttgggaactgagtcacgcaaaaactgcttcctttttgttcccagatagctgtcactttatatgtttgctttatctcatgtaaaatgtagatttgctgagcaggagacaatgcatggttgactcctccccatccttttctttaagcaagtgaaatgtggattttctgagcactaatcagagcctcacagaatgtcatcattgtctgcctatcctccttttctttctgcccctcgtttctccaaatattaaagttcccaaaactctttttggaaaaagcacaggacacaaaacctattggggcttgtgttccccagccccaccctgggcgtgtcctcaaccttggcaaaataaacctctaatccactgagatctgcctcagtcactttttgacttacatctccttcactccactttctccctgggagtaaactggtgtttcccaaagtgtgtgtcctcctggctcttgattgacttatgggaagaattacattgcctttagtggcttccattggagttgcaagcctggaagagtgatgggtttctcctaacagggacaaaaccctggccagggagctctgaggttacgcctctggagctgcatgggtacagtgacctatcccctaggtgtatgcacattgcctccagtgacaccagacaataggcaggctacagccagcactgaatgtcacccaacgctaagtccactcttctgcttagggtacggaacatgtgcgcttcttttttttttgagacaatcttgctctgttgcccaggctggagtgcagtgatgcaatcttggctcactgcaacctctgcctcccaggttcaagtgactcttgtctcagcctcccgagtagatgagattacaggcatgcaccaccacatcaggctaatttttgtatttttagtagagatggggtttcatcatgttggccaggctggtttcgaactcctgacctcaggtgatctgccacccctcaccctcatctcggcctttcaaagtgctgggattataggcatgagccgccaccaccagccacatgtgcacttctttatcagctctgaaaactgtgagcaactgaacttcctacaccaagggggaagaggacggtggagacagcacatgctgactgatggctcaatactccccctgtaaaacggtgaggataacatccagtgacagatgcacacgtggcttccaatctcaagaaaactgacctcataaggaggggagaaggtcagcaaggtttcccaggccgagaccctgcgaggtctgataagaaagggagcaattttaaaaatcaatggaatatttactggagtcctgagcatagtcctgcatctattgtaaaggatgcttcccaggtatctataaataaaagatgcttgcccttctgtgtgggtctcctggaagctgtagaaaggtacgagacagagaaaaaaaaaaaaaaaagccctctccatatcagaacattctgtgatagacggcatctcctactgacattttcattagcaggaaatttatgttcctatttctgtctgttgtaatgaccattcatagccatagcatggtggcggctaatggacaggaatggaaaaaaaattctttaattaatgcagaagtgaagctttttctttctgcactttgagaagccaagtaattcacagcagttcttggcactgaagtggaggtaaaataattatacgcaatttctagtgattaaaagattgtaaaataattttagttacatcttaaaattatttattttgtaaatgagaaaaagtgaagaaatgtgaataatgagttctgagtgtcagggtagattctggagaaagttcctcctggatgcctgactgcagatggcacctggcctctgagcttctggcctgaggccagccttgacctctgtccagccctgtcctgcttggttgcatggttgtccagacttggttggaagggaaaccagcccatctctgggtcttttctttgaatgcatggtcttaagaagaggagctatctgaatcagcagttgccttacaagggagtttttgtttatttgttgtattaggattctctagagggacagaaataataggatatacatgaaagggagtttattaggagaattgactcacacaatcacaaggtgaagtcccacaataggttatctgcaagctgaggagtaaggaagccagtccgagtcccaaaacctcaaaagtagggaggccaacagtgcagccttcagtctgtggccaaaggccaaagagctcctggcaaaccactggtataagtccaagagtccaagagccgaagaactggcagtctgatgtttgagggcaggaagcataaagcacaggagaaagatgaaggctggaagacacagcaagtcagcttcttccaccttcttctgcctgctttttctacctgcgttggcagccgactggatggtgcccacccacattttggatgagtcttcctgagggtgggtcttcctctcccactccactgactcaaatgttaatctcttctggcaacacccagttagacccagaaacaatactttgcatgcttccatccaatcaagttgacacttaatattaaccatcacatttgttttgatttttgttttcttttttgaaaatctaaagccaggcttcagggaagccatgtagggtgcttaaggtaacacagcgaaagtgactgagttgactggtgcaggtctgtaggcccaatgctgcttatgcctcccaaggccttctgcacgcaggtgcactctgcagacactccatccccttcctctcttgagaggatgcgggagggcacatgagagaaagcaatatggaaaattagcagatgaactaggaagaaaaatcataggcagggtactctgggcctcctgggttgtggaaaggagctgtacagagggtggtgtgttgtttgtgcagtatggctcaatcggcccttacccggcagcatccctgtgggatactccatgaagaagagacaagctccaaggcgatggtgcagggatgcccaacacgtatttagcaactcagtcagggaaaacaaaggtctcctcacagagaaatgcccctcactacactgtttttctcgttaggtgtgggtgccttaagattgccttctttacatttccacacatttaaagaaatcctgctcaaatcctagagcagaaagttctgggactggaggactggaggctacatcagcagcccagcctagtggaaaaaatgaccacattttataaattgtaaaatgtgtttattgtagtatttctttatcatatcctgaataatactacatatgcttacatacatttatatattaaagtgtgtataaaataaaatttatacaaaaccaggtagataagtttacagatgatttcaagtttttttttttttcttttttagagacagggtctccctctgtggcccaggctggagtgcaatggcaccttaaaggctcattgcagccttgaacttctgggctcaagggatcctcccacctcagcctcctgagtagctgggactgcaggcatgcatcaccatgcccagctaatttttaaaatttttggtagagatagggtttcactgtgtcacccagattgttcttgaactcctgggaccaagcaatcctcctgccttgaagtctcaaagtgttgggattataggtataagctactgcacccagcctcaagtattctttaaaggtaattttgacactgtgattttccatgtgcctactgaagggcctatctctttaataagaataatttcaccagagtaatagctatggctttcacggagtgtgcccctgccaggcactttgctaactacctaggatgcattatattacagaatctccacaactgcccttcaaggtaggtattattcccatctcttgagatgtaggaattgatgattagggagttaaatactaagtatgcattttggagcaggagtgatctggtttggatgggaacttggtcatttcctggctgtagggtgcagatagcttactgaaggcctctcagctcagttcctggtaaccatgacagctgttacaagtgcatccctgaaggtctgtgacgcgtccagactcctcttctgcctgctgtcccatggcaggctcttcctttctccgctgacttgcttttgcaccttggccatatctgtgtgggtctatttctggaaactattctgtaccacccatcagtatcccctcgctaataacaccacagtgtcccgaataccgaagcaaattctgaaatcagacagtgttgacaaatttgcagcagcatttattgaaataatttttgattgtttttcagtatatagtctcaaaaatattttattacgtttgtcctaagtattttacttttggacctattgtaaatgatactgtttttaaaatccctgtttctagttattcattgttagtatatagaaatatgataaatacttttcttttaaatcttttatcctgcaaaccttgataatctcacttactagttttaaaaatatttttgtagataccttgggattttctaagtatacaattattaatatttcttctgtgaatagggacagttttatttcttcctttctaatttgtgtgccgtttcttttcttgccttatggcaccggctcaggcatctagtaagatgtaaaatagaacttctgggagtagacatccttgctttcttcccatcttggggaaaagcatctaatctctcatcattaggtgcgatgttacttgtaggtttttcacacatatcctttattcggttcttattaggttgaggaattctcttctatttctaattttgctgagaggttttataaccataaatggttgtctaatactgtaaaattctttctctgtaccagtttatttgtttttttcttctttagactaataacaaattaatatggttgatagtgtattatattaattgatttttaaacactgaatcagccctatacttccaggataaatcccacttagtcacagtctattattacttctatatattgctgaatataatctgctaacattatgttgaggactttttcctttcttgtacatttttgtctagctttggtatcagggcagatctaatctcctaatttgggaaatagtccttcttttattttcaggaagggattgtatagaattggtgttgtttctcctttggatgtttgtcagaactcagtgaaactatctgatcgaggaggacaattttttctccagatttttttttttttaaacttctagttcaatgtttttaatagttataagatgattcaggttacctatttcttcttcgaaaactttggctgtttgtgccatttggctaagtagttgaatttatatgcacatagctttttaaaaataatgttttcttattaaccttctaatatctgtgaggtctgtgggcatgtccctttttcaattctgctgtttataatacattttgtctttctctggtattttccttgtcagctaaaagtttatcttctactttttttttggagaatcaattcttttttgaagaatcaacttttgttttctttatttttttctatttattttttattcgtattttcttttatttctctttattatttcctgcttctgcttgttttgggtttcttttgctcttttttttctagtttcttaatgtggaagcccagactgttgagttgaggtctttcttcttgtctaatgtaaactttgaatcctataaattttcctttaagcactgatttaagtacatactggaatgtttgatacaatgtcttttcattttcgttcagttaaaatagtttctaaattttctttagattgcttttttgacacgtataattcttaatgtaacttttagagcagttttacatttacagaaaaattgaacagaaagtaggttcccacccctcatcccccatgagtttccccaactgttaacatcctgcactggtgtggtacatttgttataattggccaacgaacactgatacattattattaaagcccatggttcacactatggttcttcctttgtgttgtacagttctatggatttttccaagtgcataatgtcttttatccatcattgcaatatcatacaaaatagattcactgccctaaaaatctgctgttcttcaactgtttatcctttcaccatctcaccccacaacccctggcaaccacatatctccttactgtcgctacaattttactttatccaaagtgtcatatagttggaatcgtacattatgtactattttcagattgggttctttctctgagaaatatgcatgtaaggttcctctatattccttcatggcctgataactcatttctttgtattgctgaaaaatatccccttgtatgaatgtaccattgtttgtttaccccttcacttatggaaggtcatcttggttccttcctatttttgccaattctgaataaaactactatgaacattgtgtgcaggtttgtgtgtgggcataagttttcaagcctgttggctaaatacctagaagtgtgattgctggattatatgatacgactgtttagcttcacgagaaactgccaaattctcttccaaagtggctggtgtctttgaaatcccaccagcagtgaatgagggttctggttgctccatgtcctccttaacaactgctgtcttcagtgttttggatttcagccatcctaatagatgtggagagatattgcataattgttttcacttgcaattccctaaagatatttgctgttgagtatcttttcatatgctgttttgccatctatatgtcttctttggtgaggtgtctattcagatattttgtcacttttttaattgggttgttttctcattatagagttgtaagagttcttcatacattttagatgtaagtcctttatcactttgttgttttacaaatattttttctcagtccatggcttgtcttttcattctctgaatagtctttcatagataagttatcaattttaataaagtctaagttaccgatttttttttttcatggacatattgccaaatccaaggttacttagttgttttcttttttcccatgctgtcttccaggagttttatagttttgcatttaatgtttgggactcaggtcagtgtttagacagacttttttttttttttgtatgtggatgtccagttgttccagcacaatttgttgaaaaaactatcttttctccatgtgatcgtctttgcccctttgccaaataccagttgactgtatttgtgtgggtccatttctgggctttctattctattccattgatctatttattcttttgccaatatcacattgtcttgactactgtaacactacagtaagacttgaagttggataattgatgtcttttgactttgttcttctttaacactgtgttggctgttttgggtcttttgccttttcatataaactctaaaatcagctgtttgatatccacaaagtaactctctgaaattttggttggaatttcatttaacctattgatcaagtttggaagaaccaatattttaacaatgttgaattttttcatccatgagcatggaattgttttttatttatttacattttcttatttttaaatcagaattttgtagtttttctcatacacatctagtacatattttgttagatttatacctatgtatttctatttttagtgctaatgcaaattctgttgtgtttttaatttaaaattccaattgttcattgctggtctacaggaaaacatttctttgccttactgtactagctaggaattttggtatggtgttgaataggagtgatgatctggtttctcactgttaagtgtgttaggtgttagggtttttgtagatattatttatcaagttaagttgaggaagattctctgtattcctggttttttaagagttatttaaaaatcatgaataggtgttggagtttgtcaggtgcttttgctggatccattgacatgattataaatacattttagctgttgatgtggtagattatattgaatattcaatgtcaaaccagacttgcatactagaaaaataccatttggtcatgtataattattttttatacgttttggattcaattagatgattttgtgaggaattttgcatctctatccatgagagatattggtctatagtttacctttcttcttatgtcttattatcctattaatgtccatgggatctgctatggttggaaggtgtcccccagactttatgttggaaacttaattttcagtgcaaaggtgttgagaggtagaacctttaagaggtaattaggtcatgagggttctgcccttgtgagtggattattattgtgggaatgggttacttatcacgggagtgggttcctgactagaggatgaatttggtcctgtcttgcacattctcaccctcaccctctcttgcctttctgcctttccccatgagatgacacagcacaaaggccctccataaatgccaatgctatgcttttggacttctcagcctccagaaacataagctaaatcaatttctgttcattaaaattacccagtttgtggtattctgttatagcaacgtaaagtggactaagatagaatcagcaacaatgctctcttttatttatgatattagtagcttttgtcttctctctttttttcctggttagcctggctggagattgtgcaattttattgatattttcaaagaaactgttattggttttattgcttttctctattgttgttctgatttcaattttttaaattatcatttctttcctttatgctgtatttaatttactcttctttttatttttatttatttatttatttatttatttatttatttatttttgagacagagtatcgctctgtcacccaggctggagtgcagtggtgtgatctctgctcactgcaagctccacctcccgggttcacaccattctcctgcctcagcctcccgagtagctgggactacaggcacctgccaccatgcccggctattttttttttttaatatttttagtagagacggggtttcaccgtgttagccaagatggtctcaatctcctgaccttgtgatccgcctgccttggcctcccaaagtgctgggattacaggcatgagccactgcacctggccttactcttctttttctagttacctatggtgaaggcttagattattgattttaaatatttcttctactctaaaatatgcattgaatgctatacattttcctctaaccactgttttcactgcatcccagaaattttaatagattgtatgaatattttcttaagttcaaattatgtttaaatttcttttgaaacctctttgacctatgtactgcttggacatttgtttaatttctaaatattttgggattttccagctataattttgttattgatttctagtttaattccactgtggtctgagagcatactttgtataatgttcattcttttaaatttgttaagatgcgtttgtgtcccagaatgttttctttcttggtgaaatgctcggtgagtttgaaaagaatgtgtgttctgccattgttagatgaagaagtctatataagtttattatatcaagttgattgatggtgctgtcagttcaactatctctactgattttctgcctgctgactctgtcagttactaagagaggggtgctaggtctccaaatataattgtggctttgtctgtttcttgtggttctattagtttttgtctgatatattttgatactctgttgttttgcacatacacattaagaatggtgtgttgttttagaaaatgttatcatcatataatgcccttccttatatgtgataatttttcttggcctaaattctgatttgcctaaaattaacaggtacttcagctttcttttgattagtgttagcatggtatatctttctgcatttccatagttttaatctagctttccctttatatttaaagtaggtatttcttatagacaacataagttgagtattggtctttgatccaccctaatagtctctgtcttttaattgtcatagctagaacactctcattttaagtaattatagatgtagttggattaatatctaacttactggtatttttaaaatttgttgctcttattctttgtttctttttgtcttccactcttttgtctgcctgctctggttttcactgagtgtttcctatagttccattttctctccactcttaatatatcaaatatacttcttaaaaaatttttaagtggctatcccagagtttgttacatacttttacaactaatccaagttcactttcaaataacactatactgtattgtgggtagtaaaagaaccttacacagaatattcccaattcctcccttccatctcttataacattgctgtaattcatttcccttatctattagttatactcactgaatatattgttgctattattattgttatctgttagaataattaagattgagaaaaataaaaattttattttacctttatttataatttcttcaaattgctacttttcttcatgtagaactgagtttctaatctatattatttttattctccccaaataattttttaaaacatttcttgcaaggcaggtttactaatgacaatttttttttcaatttttgtttgagagtctttatttcgccttcattttgaaggataatttcattggatatctaggttagtggttgttttctttcaacgaattacatatttccattcactctcctcctgcttgtatgacttctttttttttttcttttttttgacagagtctcactctctcactcaggctggagtgcagttgtgcaatcctgggctcactgcaacctccgcctcctagattcatgagattctcctgcctcagcctgcctagtggttggtattacaggcatgccccaatatgcctagtttttgtattgttagtaaagacgaggtttcaccatgttggccaggctgggcttaaactcctgacttcaagtgatctgcccaccttggcctcccaaagtgctgggattacaggcatgagccactgcacccaaccctgcttgcatgatttctaaaaagaagtctatgttattcttattgtttttttttttcttcaggtaagctgattttttattctctaaattctttttagattttctctgtcattgatattctgcagtttgaatataatataccttggtgcagtttttgatacttacctgcttaatgttttctgagcttcctggatctgaagttggtgtttgtaattaattttggaaatttctcaaccacttttacttcaaatactttgtttttctctctttattctccttgtggcattcccatgacgtgtatgctacattttagtaattgctctacagtacttggatattctgttctgtctttttcatccatttatttttttctgtgaatttcaattttggaagttcctattaacatgtacaaaagctcactgattctttccttggcggtaatcagtctacttatgagttctttaaaggcattcttcatttattacctttaaaaaaattctagcatttcctttgattatttcttagaattttcatctctatatttatattacccatctgctcttgcatgttttccaattttttctattagaacccttagcatatttatcatagttatttaaaatttccagtctgataatttcaaaaattctgccatatctgtcttgttctgatgcttcctttgcctcttcagactgttcttcttcttcttctttttttttttataacatgccttgtaattttttttttggttattgctgttgttgttattgaaagatgtatcaggtaaaaggaactgaaatagtatggttagggaacattgtgtaattttaatatttttaaattgattaaaattaaaattatgacccaggacatggtttgtcttgatgaatattccatgtaaatttgtaaagaatatgcattatgctggtggtgtgataaatgttctataaatgtccattagattcaattggttgatggtgttcagttcttctctctctttgctgattttcacttgttctatccataactgagaggaatatgttgaattatctaactataattttaaatttgtctatttgtcctatcacttctatccagttttgcttaatgcattttaaagctatattgttatgtgcatacatatttatgtttgtactgacttcttactgaatagacatttttgtcatttgtctctttttctatctggtaatttttcttgctctgattttctccttatctaatataaatataatcatttcaggttacttttaattagtgtctccatgatgcattgttttctgttcttttacttttaatcagcattatattttatctatctatctatcacctatctatctatctatctatctatctatctatctatctatcatctatctatctatcttatatataaaatcagccatatttatgtgagtttttgttgacagcatacagttgggtcttttaaaaaaggtcaatttagtgtagacagtgtctgtcttctaattgatatgttttgaccattcgtatttaatgtaatttattaaaaggtttagatgtaggcctaccttttatcatttgtttttagtttgtttcctaagtttttaaaaatgtgtgtgtgtgtgtgtgtgtgtgtgtgtgtagatagataatacatttttactgtggtaaaacacacaacataaagcttacaattttaattattttaagtgtacaattctttggcattgagtacattcacaatgttatacgaccttcaccactatttccagaacttttttatcatctcaaacagaaactctgcaatcattgaacaataacccccatttcttcctgcttccagttcccttgtaatcattattctactttctgtcactataaatttacctattctaggagcttcgtatacaaaaaattaggtaatatttgttattttgtgtcaggtttatttaacttactataatgttttgaaggttcccccttgttgtagtatgtatcaaattttcatttccttttgagattgaatgatattgcatatatacaccacattttgtttatttacttatctgctgatggccatttgggttgtttctacaaattggatattatacagaatggtgctatggaaattgatgtacatgcatttgtctgagtccttgctttcaattattttgagcatatacctagaagcagaattggtgaatgatgtggtaattctatgtttaaaaatttgaagaactgataactattttccacagaggcttcaccaatctacattcccaccaacaatgaatgagggcttcaatttctccacatccttgttattttgttattactcttattttttatgaatttgatcttgtatcccattgtggttttattctgcatttccctaatgaatagtgaacttgaatatcttttcatgtgcttactggtcatttgtatgtcttctctggataaatgtttgtttaagtcctttgcccattttttaattgggttgcttgttttctttttgctatagttgttgattttcagtaattttaaaaatatattctgactttttaatgattgccattctaactggtgtgagatggtatctcattgtggttttgatttgcatttctctgttggccagtgatggtgagcattttctcatgtgttttttggctgcataaatgtcttcttttgagaagtgtctgttcatgtcctttgcccactttttgatggggttgtttgtttttttcttgtaaatttgtttgagttcattgtagattctggatattagccctttgtcagatgagtaggttgcgaaaattttctcccattttgtaggttgcctgttcactctgatggtagtctcttttgctgtgcagaagctctttattctggagaggatgtggagaaataggaacacttttacactgttggtgggactgtaaattagttcaaccattgtggaagtcagtgtggcaattcctcagggatctagaactagaaataccatttgacccagccatcccattactgggtatacacccaaagggctataaatcatgctgctataaagacacatacacacgtatgtttattgcggcactattcacaatagcaaagacttggaaccaccccaaatgtccaacaatgatagactggattaagaaaatgtggcacatatacaccatggaatactatgcagccataaaaaatgatgagttcatgtcctttgtagggacatggatgaaattggaaatcatcattctcagtaaactatcgcaagaacaaaaaaccaaacactgcatattctcactcataggtgggaattgaacaatgagaacacatggacacaggaaggggaacatcacattctggggactgttgtggggtggcgggaggagggagggatagcattaggagatatacctaatgctaaatgacgagttaatgggtgcagcacaccagcatggcgcatgtatacatatgtaactaacctgcacattgtgcacatgtaccctaaaacttaaagtataataataataaaataaaataaaatatatatatatattctggatattaccattatccaatatgtaatttgaaaatattttcttcccactccatggatcattcttttactctgttcatagagttctttgatgtacaattgtaaaaattttgatagagacaaaattatttggcttttaaatttttgcctgagtccttggtgttatacccaataaatcattgccaaatgcaaggtcatgaagattttcccctatgcttttttctttctttttttaaagagttttatagttatagctcttttgtttattttgagtcaatttttatatgtggcataaggttggcatacagttttattcttttgcatgtggatagccagttttcccaccaacattagttgaaatgtttgtctttcccccattgaatggtctttgtatcctttttgaaaatcacttgttcttgtatgtaagggtttatttctggcaattcgattcattagtttatattatctgtctttatgtcagtaccacactgctttgattactgtagctttgtggcaaatttttgaatgaggaaatgtgagtcttctaccttgtttatttttcaagattatttttggctttttggggttctttgagtttccaaataaatttaagatagatttcctatttctgaaaagaaacttcattggtgttttataggaattatgttgtattgatatcttaacaatactaagtcttcaaatctataaacacaggatatctttccatttatttatgtcataatctctctcagaaatgttttgcaattttgtgagtacaagtcttttgctgcattggttaaatttaatcctaagtattttatttttgaatgttaacgtaaattttaattccttcttaatttcttttcaaaattcattgttaatgtatagaaacacaactgactttgtaactcacaaatatgttgactcttattagttctaacattgtttttaatggaatatttagggttttctatatgtaagatcatatcatccagaagcacagatgacaggtctttcttttccatttggatgtctgtatttctttttcttgaccatttcctctggttaggactttcaatcaattgttgaaattaagtcttgaagaccaacatccttatacaattttagtcttagaaaaatagttttcagtctttcaccattgaatctgatggtagctgtggcttttaatatatggcttatatcatactaaggaaatatccttctattgctaggtttttttagtgttttaataatgaaaggatcatcaatattgtcaatgctttttctacatcaatcgagatgatcatgtcttttttctttattctattaatattgtgtatcacttttgatttatatatattacattatcactggatatcagaaataaatctcacttagtcatggctttggcatctatctatctatctatctatctatctatctatctatctctatcatctatcaatcacctcatcttgtctatgttctaatgcacctccttatttctcttcttgttgtgggactttaatgacatgtgtattagaccttttggtacctttccacacatctctcaggctttgtttcttttttccccaattattttttatttttgttgttcagactaggtaagttttcccagtctttcagattcagtgactttcttctttcatctccatcaatagcagtattgatctcattcaatgaatttttttaaagtttaattgtatttttcagttgtacagtttttattttattcttttatatatcttacatttctgtgctaagaccttatagtttttcatttattttgaaagtgttttcccttatttcttggaacatagttataatcactgcttaaaatctttggtagttccaacactctgtcatctccaggttgttgtctatttgtcattttctttttctttgagtaatctagagaattttctgattctttatatgtcaagcaattttagaaggtatcttagacattttgagtattatactaaggggctctgggtcattttaatcttttgaataattatttattatttatttattgttactttgttttatttcagtaggcaatcaaccaattatgatgttcaggctgcaagcccacagtctgtgtgttgtggttccaatttaaattcagttttcagagtgcttacaagggtattcagatgtgttcttcatgtgtgtcacccagtgcccagtctgggacctgggagttattgtagttctcaatgccttaggtatgtttcttaaggccagattcatgtacacactgcttgggtataagaccaggagttcatacacaactttttagaatcacttccttgaacattgtcttttccactctgtcctaaatactcatttactcctaaagatttttcttcctggcctgattagtgtctctgctccactgttcacttcctgaaactgtgttatctccagggtcaagtggcaagatgatagagagaaaaaggcatgtggcttattcttatgcttttgggaccacagtttctcttgtaaaagagaagtgtttccctccttcatggctttaggcatgggaccagctcctgttgttgctctgccactgtaggattgcctagtagctagagtaggagagaataaaacacaaacaaaaatgcagagaattttccccactatctgacttgtagagttcccttttataattttttgatcaaaaataaagggcctatcttaagtatttttctgaccatgcctggtgcacagttgcaggttctgggctgccttcaagttcaggctgaacaaaacagagaaaggaaacaaacagagactcacttccattttggcagcattttggtatctgttttccttctctaatttgccttctacttaaaaaagattattcaattttattttatttaaaaacctatgatcactgctccatctagtctgtccaggattttagttgtagttggtgaggaggacagagctttctccatattaactaaaactagaaccctggcagctattcttatccccattttacagtcgagaaaactgattttctaaaattccattctgtttccttttgttttgtttctttctaaaatccaatagtactaaaagacagaactaacgttattctatctcatcccaatgctccttatctacctaccaactatcagttcaagaagtcaaaacctgatttgaagatgtggaacagagaccaaattacagatgccacaagctgacttagctcctgcctaagtgagttatgagagcaagatctcttgcctggaggtcgggaagcctatattctactttttttcttttttgcccaaatctttagtcaatcctggtcctatctcaggaaatgggttttatttgtaaaaaaaaaaaaatatatatatatatttagaaatatctctaacgattctccctctgctggcattccatgattagcagaaaatgtcatccagagtctcagtaaaggaagaaaccactggagactgagttatataggtatgatcccatgcaagataaatggggctcaagtagtactctgcttgatgtttaagcaagatttattaacacagggaaagagtagggtagtggcagacaaccctagctttgtggcttccagcagttctttttccttctggttacatcagcctcaaccattcctcccttacattctatatttgcatttttattaggctgtgccatcctcaagcttgggagtggacctgagattggcaagaaaatcagcatattttatcctcctcttcgccatagagatgggtgcagggatagccacatgacccacacctattcaatcagagccttttgttctggaaaaaaaaaaaaaaaaaagtgaaagaggagctcgatttccctgctctatttagtaagctggcaagtgcacagcaaatgctcttgatggtcatcttttccatatgagggaagagtttctgtagggtgaagccaatgtagaaggacttgaagccaaggagatggggacctacagagtcttaaagatgttgtttgagactctagattcagccacaccagaagccagctccatttagatttttccatttaggtacataataaattatctttgtgcttagaccagcatgaatcgaatttctttcactaaccctgatggatatcagggtgggctaaggagctaagtagtatggcactgggaagaagacaagaatgaacctagaattttgggggactgcagcagagatactgagaaccttatagcaggggtggtttggcaggagcaatgtgaaatgaagtctatgaatagattttttgccagatcttggactgtttgtttcagaaggccaagatgtttgaatttttttcttgaagacaaagactgaagaggtacctgagctgggctggtgcagcttcagcttttcagagaatgcaagttaatgtggcagcaaatcttttacagagaactgatcagagatcccccaaaagtaaggggtgagttagtcattgatatggtttgaatctgtgtctccacccaaatctcatgtcaaattgtaattcccagtagtggaggtggggcctggtggaaggtgattggatcaaggaggtggatttcttgtgaatggtttagtaccaatcccttggtgctgttctcatgatagcgagtgagctcttgcaagatctggtcgtttgaaagtggagcatctttcccctcactctctctctctcctgcttctgcttctgccatgtaagacgtgcctgtttccctttcaccttctgccatgattgtaagtttcctgagtcctccttggaagtcaagcagtttccagcatcatgcttcctgtacagcctgctgaactgtgagccaattaaacttcttttctttataaattacccagtctcaagtatttctttatagcaatgtgagaatggacttataccgtcattgattgctctagctctgctgttagcagtgccctaattgacaaaatcttgcaccaggtgttgcaacaatggcttcatctcaggcaatctggaaaaaaatcaacattttcacttgaaacctgtggagcccaaggacccaaattctagtcccacccaaatctcacccttactagttctgatcatcttgagataagtattaatttggtgttagtttcctcagcaatctctagtttgtgtttgttttaataataatgactgtcccatttagttggtgtggccctttgaatgtgaaatgaaatgatctctgtgaaaaggctttgggaacttggagagttaagccagtccaagggaaagtcactcgagagatgcttgaaattcttgagtcctgcgcactgtagattttctgctttcaaagagctttgcccctgctctacgtcatcctgaagtggaaagtggtttcaattccattaaatcgaagaaaaggcaattggagatcctaaattggtcatggctgccctgggaggtagtgagctccccaccacagggaggatttaagcatctaaataaatacctgttagaggggctatggagatttctctttcctttgtagaaagcgattcataacaggctctgttttgggtgctaaggtctggtctgtccggttcgttaattctcagcagggtgacttcccatttgtaacctgtgcaatatcattgtccctttaaagaaattcaaagtgtgctgtttcgcgacaggtttgctgttgttatttagtacttttttgaattttcaaaagcctgtctctccctctgcttttcaatactaccatctccagccttctggttcacaaaatccaaacacattgtcctgcataagtaataatgaagaaatctacaagaaaagatttgtggcatttgctaatcagtttaataatggaggatatttccaccacattatatggagacaaattaaaagggcaaggagagctcccagaaatcatctgttcgtgttaacaaagtgaatattaatgaaaaacaaaattgagttcctcttgagtctgattttcatcaaatcatacaggtattaaaaaatagctatagaaatcctatccattagtagttaattcaaaataactttggcctctgctctatttttgactattacccctctcatgggcagagaagccagtcaccttgctggacccaccgtgccatgaggatcaataatggagctaatttagttctttatggaccaaatatctagacagtggaaatgggaattaagttaatgatgcccatggatgggaagaggggcaagaggggcaccagggagcactttgcttgtttcctctggtaaccaggttcgggttgcccagatgaccaatgttctaaatcctacagaactcagacaccttgcagagaccaatatggcctttccaggagaggggtcatgcccaatggcttgtgtccaccttctgggcctctctctgcctttgccctgccctaagtggcccagcaggggtgcagctcaggatgaggaagggtctgaaatgccatgggctcacccagctatcaacagtgaggtgctggggagtgcctccaagaggggcccaacataactcactggagactgccactagtactcccctttgcgggtggacggaaggttaatggtgattcccatattataatattaggacacatttgagatttgtggggaaagaaaagggccgggagggaattaacagcttctggtgagaaagaggcaaggacccttggtgtgtacaggctctcaggccagctccaggacacttggagtctttagggagaagggaaggtgccaggaagaagaagggaaaatatgggtataagcaaaacacttgggaagaacctgaaggcaaacatggccagactgcatgtgtgtgctgagggctgaccactttatctacagtgtgactctcctacctcggcgatgtcgagaaaagctgtgttcactccagccagcttctattacttatcacatctgacatggccagaacctgggaggagctggctgtagcccctgaggtatggtcaggataccaggatacggctctctgaagctccttgctgcatcccatgtcctcagaagataccatcagagaatggtcctgtccaggaggaaatgtctctggaactctctctccaacaaaatagaaggccacagaatgccagcatcatgctgtgtttgtgtggaagtgatacaggctcctctccataggactcaagtgagtcccttgggctggactgggaccagaactagttcttggtccctcctccttgcttcaagtacctgggccagatggatggacataactactacttcctgacagccaccctaggctccgagctctctctgtggaccagtttcctgggctgactcatggtttttctgtttgcctgtaacataggacttacatgcttgccttgcacaggacttttgacttgagtcccagcttttaatagcttctgcctcagctccctccagtgttcggattctgtttctcaatagccaggaatagttaggaatgctttcagctgcaaggaaaagaaaaccaacaaagggttcagaaacacaggaggcttgttttactcatacagcaattattctggttacagatatttcagtgcatcaacaatgccatctgcacggtctgtttttctcctccgtcctcctcagctcattggttttattctcatgtttgcggccttgttgttgcaagatggctgctcaaccatcaggtgtcacatctacatttaacgcaggaaaaagagagagaagggcagtggcaattgccttttccatccatctggggatgtagcttttccatccatctggggaaacaaagactcccttgacagacaggcacctctctactggctaaggttgttggggaccaaccatgcagtggctggattttcctagagccagtccagttctggtatgtacaggacacttattgcaagaatatactgagtgtcaggccctatcttaggcttttgggggaaggaggggacagaggttaatggatggcaagctcattttcacggtagcctgggagaaactatggataagaatgctgcagacaacattgtcctcctcctgtcaaatgctgccaatccttaactagtgagggtgaatggtctgaccttagggcatgactaggttcaatgcccctgatgactactggtggggaagaggacagagatgcccaatactggacctggctgtgtcacttcaagtctgcctggtgtgaatgccccccgtcttcttccaactgtctgctatgcagggtgagaggtcggcccagccccctctctacccagacggccttgccagcccacatcttgcattcagacccggctctgagggcagcgggcaggcagtcaccaccctccagatgaccaattcaaaacacatggggacctttgcaagcccttggaagacatgctatttctctctgcctgcataattgttgagaaggaagccagagacggtgttctaattaattagagaaggtatttgaggatgccactgtgtgctggactcaggaccagaatccaaatgtcccacttatctgcctccaccactgcgaccctgagctgcccctctccttccctgcattcgtatttgtgtgtaaactgcagcttgtgaccgaagccttattagttggtcaaaattttacttttaaatggaccattaacctactcagaaaccaaagcacactggtaatgtaatacctcagcctcctgtcgggcctcagagtgaaccaggtcagaaacgacgtctatttctctccattatcccacagatatccggagcacgttctcacccacaggacttctcagtctggaaagacttttcccatgcagtttgttaatccaagctgtgccattgacttggacaagtcactttgctaccctaagcctctgagtccccatcaacaaaatggaactagctgttttattaaaaaaaataagtaaatctcgttgaccatcagggaggtgacaagtcacagagctgaaacgaaggtagcttggattccactccattctgggttgggaagttgggtgcttcccactgggcagttcttgaagctcccttctctgaaagtggggatgaagacatggataaaggtccttaagacataagagctccttccagtctcgtgggtcttctcggcagaacccttgcttggctggaattccatccactctctgcaaggcataacttcctgtttcctagggagaggggcttataaaaaggcataaaaatgaggcttctaaagacatcctggacgtcaactagatgttgcaaaattacattttgatgagttcagtgtaaatgaaccagaaacatatggattcaatttcccttggaatccacatgggtttaaaaaccaagggggcgggggagaatgcatttggggaagagcattttaggtctcaccaaaatccccgcatttgtaaacagcagtttgaggtttatgatgattgcgtcccgggctgggttcctttcctaataatagaatgtacaggatgtcttgcagcagcctcacaaaatgctttcagggaaaaatacccaaacgctgccctctccctgtgctcctgggttctatggaactctgcgatggcctcccagatttcctgccctgggtttgaccccataagtaccctctttgctccttctgcttctgcaaaaatagcatcccaatcaggtccacacaatcagtgactgtcaagtgccaggtttatcctagggatttcagcaagtgctacatttagtaaggtgggcagcaccacccctgctttaaaataagagaatcgaagtccaggacattcggcccaaggctgcttagctggtaggtgccagggttggcatgggaggccagggcttctgaactgaagtctggagatctttccaccataaaggatgcatttctattcctcagtttcagagaaggctaagaaaggtatctgtttatctggaactgctgtaaggtggtctaccaggaggctggaggaggggctaatgcagccattttcatggtggtcccagagaagtgcttggaattccccatggttccttggggagttccctgggagaaggaatagaaaagctgagagaaagaataaacttactgaacccccaggcccctgctcccatctagggaaacttgctctcctctgttctacctattgagctttcaaatatgtatttgattataggaagtttcacagtttaagtttcaaaatcatggatcctgaggatttttggtggccccccttttccctcctgccagtcaatgggttagtgttggcttcttgtctgcttttgtgctggggggttctgtacccactatcagatgggattgctggaactgtggatggacccacagagccctttgagggatgctttcgtgctcagtcctctgaccaggcaggaggcagaaatgcaggatgggaccctgcctccagcagacttgaaatctgattttgttgaaaagacaaaacccgcttccagaagtcaccttggaaagatgaccatgtgagataatgggcaggctggttctgggcatgggagactccagccctgtacagccatacactaatcaaacaatggcccaatagaaggcagttggatgggccagagctttggaggtagtgcttctgaatgacttggaccagagcacagaagggacagagacttcctggctctcagctgatggaaggagccacaagactccactgtattgggtctcccaggggaagagctgcctggccccgcctaggtacatcctgcaaagcacagccaggatggagatgggctggaggagccatctgattcttattaggctgtgcaactttctttattggcaaacagtctgtcagcagcttcttcctgcagagcggcccagatgtgcttacaaagcgttctgtgtccttcccgtccacacccagcccccgcgcgcattgccactttgccagacttcgtcctggtcccaggagtccagctgtggccaaagcaaggcttagtcaggagcctgaggaaagaggctcgcccctctgggtggcctcatgccagccacccctcgctccatgtgcatgggtctcattccccctcaaggtgcaggaggtgccctgggtggggttggggggggggcctggcctcactccttggggtgggggttggggtggggcagacagaaccctgccatgaacttatgtttgcacatgttcatcttcaacttgccatactactagggtggctttcatctgttattgggtctaaatctcctctctgagaattctcatgggagaaccacagaaaacaggagggctgctggcctctcatgggtgttcaataggagggctgacctcagaattcactcccatgattgtccaagtggcctccccatgtccctcttaagagagttcagtctcaagcatgtttctccccttgagaagctggaaaactggtgcaaaattgtgcctaagcataccacggcctgggggatattaaatgtttggaacaattaaagtcccattacatgaatgtccatggactgttttcctcccatcccacacatattgtctttctttaggtcacagaatcctgaatttcccttgggggaaccatgctcccttgactgtcataccctgtggtcatatgaaccaacgcattccctttctttacctatgttagtctcgcctgcctctcccaccacttatggccaaggctctagatggattcagggccccatacccaccattgacactggcctgccttttcctggtcattcttgtgtgtaagtaaccctaatgaagaaaaatgaagtgaggcgtgggtaattttccttcttgcatctcctgtgttcttccttaagtccttcaagtctacatgaagtttctcttcttttcttttttttttttttccggactgttctgatgatcataaatgaggatgcatacttcagccacaaacttacttcatgtctgatgttatcagccttagagatacccttgcctatgccttcttgcttagaggggaaacaggtctggaaagaagacaggagttctcagggtcatccagaaagcccacagccaaagaagactttcagaagctgcattggttgcaaagcatcaccttaccagcaaaggctattacctgctcagatgtcaccccagatctcaccaagccacccttcttggtccaaaagtgctctactgtgaatgtagtcttgtaggagtcttgatgatgaactcctcaccatccatcctctctgatttgataaaagtaaaccaattgtgaaaattaacctcagctcccaagacattcattggcatagaaagagaaataggtcttccttatggccagtgagacttaagtcagccaggagtggggcagaagataaggggcttctacaaaaggttcccttgctcctaaaaggagatataagagagaggcaaaccctttcttcttctggaccttattatttctacatgtgacttttgtacattgagagccagccatcttgagactcgaggaaagtgatcttgacaccaaaatctgggtgtgctgggaggacagaacggtgcgatgaaaggtccctgggcaatgaggactccctgagtgacaaaatcatcaaactccagagtcctggctgtttctggacttcttattttatgggatataaaagttcttattgtttgaaccagacagaatgggggtatcttcttctttggtactggagttgctctggtcagagtaagagaccatgtgccttagtcagcattacagggcatgggcatttacagcatgaattgccatctttattgacctttgtctctctctctgcctctttgctcttaatctatggcctgcctctcccccgtgtgatagctgttagagctgtgaggagccttaaaatcttcatctggttggggtagctgaagttcagagggaggaagggacttaggggcttgctcacgatgcatagaaagtgtggatccagcaggagaactcaggtctttcttgcccagctctaagctttctcatattgctcagctgtttgctgtcctgctctgtctgtctctctgtgtctcctccatacacctcctcaggtctccttctctttctgtctcctctgcccgagataaagggaccccttcacttagagctggatggggcagctctgctggggactaggggggtccgaaggagcctgtgctaaggaaacaagctggtgttgctggaaactatgtctagatggtcacagagcagcaggatggggcactgggattctgcgtgaatggccatcaggtggcgggacgcatggacggctcaccagccttgggaactggcagtgctgcatggcccagctcacggagaaggctcagctgtggctccttcctaagccatcctgcttcccactgacttggagagacagccggttggtgcggggtttgtgtgggtttatttactcttaataacaagcttatattttagatattccccctgggtatttctgctcatttgggcttcagtacaaaaccatgaatccacacacaaaatgtgtggatctgaaaattaggattacaccccagcatcccactaatagaggcagtcttcctttgaaggcgccagggatctctgtcctgccctggctggccaaaggaaagccacgatggggccatgcttgttaccagcgggttctggacgcatccaccaccatcagcatctgttctccccttgggtcttcattaattcagttaaggaaacatttaattagcaactgttgtggtcggatgcagcagtccatcctgggtagaagatacacaattccttactccaggagcttccatccatatgcggaagtgagaaggaagaatgtatgcacactggggcatgtaaagctctgccgtggagagtagagctggtgggtaaaggaggcctccaggatccatgtgaccctgcctgtggtcagaagactggttaagaaggcttcctcgaatgggttctcagctccaaactcacgcatgcctgcagtccagtttctaccggaaaagttgttcctactctcaacaattccacctgaagccctctcacctaacctccggcctgctcccaaccctccctgcacaaccaatgaaagctggcctcaagtaccaccaagaaaagcagaggccttgtaaggagtctcattttcttcccctaccaccagatggcgccccagcttggcctccgcactgatgggactctgagagaggaagcgtccctcttcatgtctaaggccaatccctccccatgcatcctcaatcccatctctctcttgttctcaaggccatggcctcattcggggtcccctctggcaccttgcagggtggatattctacccccttggaccatgcccatctacctacgaacaccttcactctccaccccaccctaatccagtttgcatctcgccacactgtcaaatattcatttggtgaatgtccccagtaacctccatgacgtccaccaatccaatagatgttttttgtgtgtttccttagatggaaatcctactcccaccttatgcacacgcacgttccctccctggctccatgttggttcaatccccctcttccactcaacctccaaatgttgagttcctaaaaactcagtcctacccacactctctctcaggtaagcccacccattatcccagttttaacataatgactgctcccaaatgtatagttttagtccagacctggcttgtgtatccaaccttgacttttcttatttcactctggctgtgtggcaatcctatcaagattaccacatccgaaactgaactcataactcataatccagccccaaccacccccatgtgactggtagaattctaagacatccccaaagtttctcactcctctcgtgcacatgccctgtatgatccctgggtctctgagtgccatggatcttcttttgatgattaggttatgctatacagcacagttgagtttaataaagggagattattcaggtgggactaacttaatccagtgagaactgtaaaagtagagagatttctccagttggtggcagaagagttcagaaaaactcaactcaaaggaggtttttagtgctgttgatgaggctccaggagtggcctctaggagctgagcatgatctgtggcctggagcggtaatcagattgagacttctgtcctacaaccacgagaagccgaactctgacaacaatagtgagcttcaaagagaactctccagatgacaaccacagcttggctgacaccctgatggaagctccatgagaccctgtgcccagagactgaccgatagaaaccgtgagctcatacatctgtgttgctttaagtcatgagatttgtgataaattgctttgcaacaatacaaattaacatatttccctatagcttttcatctcagtagacatcaccatcatccaccacattggttaagccagatatccttgagtttttcctttctcttactcccacatccaactcctcagcaagtcttccctcttctgttttaaaaactcgtcttgaacctctctatttctccccatcttagctgctcccatccttcctcagactctattacactttgccccatcactatagcaggtgttcacctccataccagggtgattcaatccattttccattcagcagccagaatgcttttctgaaaccatcaattgaatcatgttatctcctatttaaaatccatcagcaccttcctgctacatacacatcaggtgacatccaagcttctcactgcattctacaaagttcccaaggacctggcccctgcctgtgtctacaaactcatttcataccctctccctcttggcctggcaacaccagttatttccttcatagcacacatcacaagtgtaacttagcttatttaagtggtgtgtgtgtgtgtgtgggcgtgaatgggtaggtgtttatctttttctactagactgtagactccatgatggctgagatcatttctgtttgtgttaaccattatcatatacagggaaaccccttgcaacacgattttcctttggggctgaggtggaacaaaggctctttcccaggccgttgatgtgctttgtagaaagcaggagctccccgtgaagcacccaagtacaaagtgtactgatgggggccaaggaggggggtgggaaggggaacaggggtctcaagggttcgctgaccatgtgaggttagctagactggcctctggatccactggggtccgctaaagccctctcttccatgggggcagtctcagatttcctaccatgggccttgggcttctgtcccttggtcctttatttcaggtgccccacagaatggtgctgaatggtttgcagggatgtgcttctcttctgttcgcttaagacctcaaactgaaaaaatatgagggtgggcggtgactcactgttataatcccagcactttgggaggccgaggtgggcggatcatttgacgtcaagagtttgagaccagcctggccaaaatggtgaaacccattgtctattagaaatacaaaaattagttgggtgtgttgggacatccctgtactcccagcctgggaagctgaggcatgataatcacttgaacccaggaggcagaggttgcagtgagccgagattgtgccactgcactccagcctgggtgacagagcaagactctgtctgaaaagaaaaaaaaaaaggaaggaaggaaggaatgaaggaaatgaaatgaaaaatatgaaaatatccctctgccccaaagccgtcctactagaaccagtcatgacctaattcaataaaaccagcagctgggaaatgcagacctccactttatcctcacactgtctacactggcatccttctgccacaagggagattctgtgagcttttgtggacaaagctgggtctggacacccctggagatgagaagctatcctgggataaatttgaccctttgatagtggagagttgcaaagccactgatccactaggcttagctgctacactactggatgaagaaaatcgccttcatgagacacaagtacaggatgctttccttgcctggctgagggagggtctaccggaaaccccctacagactcctccaacccattgaatctccagtagttaaatgaaagcaccagacatttgcagctaagagactatgggtctctggagaagtgctggtcctctctgaacctcagtttctccactgtaaataggtttacctttcttcccccttgcccctgaccttggagacctattgcaaagatgaaataatatgcggaagtaaaaggcctggtacagagcttcatccccagcagctaagcagaggcttaaacgatggagtctatcatcattggtgatatcataaatgaactccttggcagcaccttgttctagagccacagctttgaaacctgctgaattgacagaaacagcaataaaaaattaaaagtcaaaaggctctggagtacatttcttaaagtatcaggctgtgtttttcccccttgtaagtttgctgagtctctggaggtcaccctgcaatgggccatcccttgggagtaggaaagcaagtttgaggccctaggggagaatagcttgggcccgggaaggggaggtcctggcctgccttgctccctgcagagcctggggacccatgtgcccagctgagggccctctagggggagaaaagcaggaggggaggaagagatatcagtgttttccaggccttgcagagagctgtggcattaaaggtctgaagaagcctgttggggaacttgcccagccctggtgaggctcacagaccaactctctggatttgaacatggcatcctgagctgtttctcctcatcctcagggcttctccaccggacagggctgcattcacgcagcccacaaaccaactgttctaagagctggtccaggaagtcttgtctctggcctgaggttcattcagggtccccatcgtctctcacattcaggctcaaaaaaggtgcagtggccaaacacgtgaatagtaacatacctgcttttgtgacacgcttgtccccttcttgggtggcaggtcccaaatgcagattgtttatgtagccagttgcagtgtaaaggctgtcatgagagacatgtaagaaatggagtgagagggttcagaagcattctatctgaaggggagagctctgtattaattagaagaaaaatattgattggttgtgtggcctcaagggcaaaaccccaaagacctgcagagaatcagagatggctgttaagctgctctaagtggtacaaggaaaatatctgtgcccccaagagcaaatgcagtgaatggaatgggatggatgttcaagacaaggtgctgcttgtaatgatccctcatcatgaccctgtgacttcagtaaatatgactaaactaataaaatgcctagtaagagtggagtggaggtggaaaccatacataaaatcatgtttcaactcaggtttgactcaaagagaaacaggaagctagcacaggtcagaggagagggtgagttcccggaagctcccacagttcatggaatgtgttttggactttcagagactgggaaaatgggggtagggtggaaatttgggtaaagggtagtcagatctacgagaagcagtgacatcccagggaatctcagggtttgatattattgcataataaagaatttaactggcctctgtccctggttctggggatacagactcaacatccttggaattttccaagtattaggagagtgcctttgttcttcatgagctcttggatctcactggagttcatgcccatgagataactcaggataggggctagtcagtcaccagaaaggcccatcatggtctttgagccagctggacctccagggaggggctggagattgagttcaatcacctggtcaatgatttaatccatgagacctgcattatgaaatcccaataaaaacttcggacattgaagctcagtggtgcttcctggctggtgaacacattgatatattaggagggtgatacatcccgattccatggggagtgggtctggaaactgtgtttgggactatgtaaggtatcactctatgtatctctttatttggctggtcctggtaatttatcctttgtaataaaacgtaatcataagcatagtgatttcctaagttctggaagtaattctagagagttattgaacctgaagggagttgtaggtctccttcagagttggtaccagttggtcagaagtgtgggtgctctgggacctctgaatttgcagcacgtatctaaataaagtgagggcggtcttatttagcctgtggagtctatactaactccaggcaattagtgtcagaattggactgtaacacaccagttaggtaataggaagtgagtctttcattatgtgagtccttctgcttcctcaaacctatttggtaaacactccaagtataattctgaataagaacaagcctttttgttccccacttgggtcctaggacctggcaaaatgcagccttgggtgtagctacattgttttgtagcctcattatgtcccttctccaaagacagggtggcatgagctcagggaggggctacttgttctggggcgggctggttctttggaagggcacaagcaaaccataaacaaagctccacctttgcaaaggcagcaccaggacttctgtttgggaggtccttgggatgacaaactggttctgagatgtcttcaagatgcttctgtataacaagcatatgtttttgactttgattgtatgtttatttaaggaggctcagggagggctgatggaagttatagggtggggacggctctgatccaacccaagcagctccttggcccaggcattttccctttggtgaggcatgcagtccctaaagaggtaagtgtcagagaaggcccagattataaatctttcccccagagcaatgcagtttcattgtacttaaaaataattaaacaaatctgtaaaacatgtttccattgcattagtttacttcacttggccccgcaatgtgaggatcataattacttaaatatttccctttactatttttcaaaacatttttctaaattgtcgaaaaacattctggagacagttggataaaaacatagtgaacatgtgtctgattaattttttaagacaatcgagatcaaatgcaaaaaatgattggaaatggtttcagagtgacaataaaagacagaaatctcagagcggggagtgcggtgactcataaggcagaaaggatttatcatttttactacagtatttatttgaacgcacatgacagggagcgagctggcctggtgtgcaaattgccaaaggtggagtgtggcccgaggaggctgtgtccagttagggccattcccccaagtgggctccaggaccaggctctctcctgatgccgagcttgtaaaacaagagatcactctcagcagccattctttgtctcctgtcattacaaacaactcgagggcaatccgctggcttctcgacaagcagatctgtccctcatctgtcagctgacaatcaggccaccatcccgaggccaccgctcgggctgccgggtgatggaaagccacttgtcaaaggagggttgatgatgtttacttacaagcacttcctaagcttgaactgaatttcatttgactttattcagtttattttgttgagtcctttttttaaaacttattttttaagttccaataaacaatagagatcacggaatgtgatttctttttctagcaaaacagtcctacccttctgccctccttctctagcatccattgtctgagaaatgtcacaaggggaagagaggccgggcctccctctgaattctttgcccttccaggggtgatacggtttggctgtgtccccatccaaatctcatcttgaattatagctctcataattcccacgtgttgtgggagggacccagagggagataattgagtcatgggggagttttcctccacactgttctcatggtagtgaataagtctcacgagatctgatggttttataaggggtttctgcttacacttggcttgcattctctcttacctgggtgccttgttggaagtgtcttttgtcttccaccatgattgtgaggcctcccagccatgtggaactgtgagtccattaaacctctttttctttataaattacccagtctcgggtatgtctttatcagcagcatgaaaacagactgacataaggaactccaagaaggttccaggcggggacactgcagccagatcatctatcagtttgaaggatacaacccctattttgctgaatgaatttgggtctccaagcatggaggtgcgtacgctagggctctaccctaaatcccaaactggaactcttttgaagggacctcaacatattgaaggtcatggccctatcaatcattctcatatccccatgacattttctttattttgtccttaagacaatttgtattattttttatagtgcagagactaatatgcctttttgtttgaaatggccagatataggaggttgttgtcccaggtttcacatcacagataagtatctttgtttcaactggaagaaaaggacaggcaatgggggccggtcttgcccgtgatgtcccaggccattcttggcacctggagttggtttgagtaggaccctaagtcctggattctgggagcctgggccctgtatcatttgctgagggcagttaggcatcgtctgctggaagttggggtgctctttggtggcccatgcacagaagggaattgtcaggctggagtgagataaagtgattgtccacctggtactcactggcccataatctatccctgggaagctgtgttcagggctggaaggtcagctttattccctggtcacccatgctcttactgcttctgaacataaggaacaaacagctcaccttggccggaggtataacatgttcatggaggtgaaccaaatagttagaattatatacaatcatggcttggccccttgatgttcattcaagtcaggtagagggtgctctaggagctcacaggtagtgggggatgaaaagtggatgtgggtgagagagggttgaacacacacacgccacactcaggtggtgggctgggccagtgagcaccttaggctggtgcctaaggaagatgtgggaggggctgaggcagggagtggcctgggaggatgatggcttcagggagagctcctgtccacactgcagggatatttgctgtgctgccctgagatttccaaaatctaacgctgaactttatcttacttctctcttctccaagacttgagtttctaagctttgaacattgtggtggtttggatgcattttgcagccataatttggtgaggatttcttgccaatctttgtaatcattggaggtcctggatcccgaagatttaagggtaggggcccagacctaccacccagagtgctgagtgcctgtggaagcaagaagcagagaagggggttggggcagggagctgcagcctcacgtgagacacctctgccctgctggctgcacccctcccttttgttgccaattctttacctactaaggtgcagccagatggaaagaaaccttgagtttaactcctttcttgagagtggcatcaatcatgtgccacctttgctagggaatccgagggcctcgtgaataattcagaaatgctacatagaatacttgttactcccaagtgttaatgaaaatatcaagggaattaattaacagtcaattatatcaattttagagttggacattgattctgatgctgagagctaaatctgaatttttgctacagttccttttcctaattctcaacttgtctttgtcatttctagtcaaacttataggggggaacatgtttgaattattttcattgccttgctgtatttcagcttacttctgataaataaagattaaaaaaagaactggtccagtattacatattttctacagctgtatgtgtacatgtagaggtgttatcttggtctttgtattaaactgcttgggggaaaagggagtttcaaactatggataatacattaccaacaaaagcgaaaaagcaaaaataacatgcatactatttgcatagaaatgtacatattttacccagaccatcacatggaagagctcacaagagatgagaagatggaaaaagaaaattgcaggtagtgttttcaccagttgttgatgacaatgggagcataggagtctgtccatcctgaatgtgtgacaagttttctaggcatttgttaaacttcacatatgaagagatttttcaacccctctctgatctttgatattaagaaaaagcatttcattgaaaacagtctttgcaggatttggcacgagtcgtctagactgctttatgaaaaatgacagctagtagaaaagtaattaaagatgtattttgctgaaagcaaaagtatttttggaatcaataccaactatctttaatttgccagttctttccacaatcattgtgtgttatctggaggatctcaattctagagaacggaggtgccagcccctttctggtcttgcttttacgtcctctgtctgcttcctcaccatcctcaagtaaggttagaggagggctgggcagggaagaagaggcatggtcactgtggtggagcaggagccagtggatctctcccaggaaagccagctgctcaacgagctcctcccagggcagcagagatgtttgaaaagtagcagcaatgaatccaggtgcagcaaaagaagcggttgttggtggtggtaactctggttttaagttggaaacaaaaggggaaggcagcttcatttatgcttttgagaagttttgaggcagaaagacagccctcctaactcttctcctctctttgttgttgttttgttttttttgagacagtcactctgtcacacaggctggggtgcaggggtacaatctcagctcactgcaacctctgcctcccaggttcagccgattctcctgcctcagcctcccaagtagcttcgattacaggcatgagccaccatgcctagataatttttgtatttttagtagagacagggtttcaccatgttgtccaggctggtctcatactcctgacctcaggtgatccacttgcctcagcctcccaaagtgatgggattacaggagtgagccactgcgcccggcctcttcacctctctttatgggaagcatttgccttagctggttgggagctccctgcaggtggtcagggctactcttcccatttctgtgcgagataccaggtaaaccacatgtactccatatgtgcttgggtgtggcttgattgatgatgacaagattaggctcccagcctgcagggtcccctttttggccctattctccccttctctccctcacatatcctttcttcacctgcctgacactcactcatctttcaggagtcagcttagatgacacttcctccaggaagccttcttggaatgcctcaccaccccagttgcatctcagaagatcagctctttttccacccaattccatcacgctgtatttggttaatggtctaacttccttagaatttctggggacaagggccagaattttctcaccaattttctccctttcctagtatggggccttgtactgtactccttgtgtttgagggagtcagaggcaggggctgaggacaacagacagcatattgtaactgcagtcatgtttctgccatgtgtttctctcaccctcttagcctacaggtctctgggtccatgggagtggtcccagggtttgaacagactggccttttccaggtctctctgtgttagaacatgaaggcctcttccctctcagcaccagagaaaagctggggtcaatgggcagtgagccctccaccactaggaggacactgggaacccggcactcgttaggactgatgggcaggtggattgaggaggtgaggtgactgagggactgaggatgcctgggtagcaccatggctttgtgacacttgaatctgccacagctgtggggccttcccaggccactcttcaggccatagagccctgcactggccaccttcccctccacaggccagggggtgaaccccaccggcatggtcgggggtctgtgtgctctgatcctggagttgtggggttcctctgggggaactcagagagcatcatactagaagtggaaggaggctgagcgcaggggctcatggctgtcatcccaacacttaggaaagctgaggggggagggtctctggaggccaggagtttgagaccagcctgtgcaacataacgaggccctgtctctattaattttttttaattagctgagcatggtggcatatgcctctagtccctgcaccttgggaggctgagataggaggattgcttgagcccaggagttcaaggctgcaatgagctatgattgtgctattgcactccagtggctgggcgtggtggctcacgcctgtcatcccagcactttgggaggccgaggcgggcggatcaccaggagtttgagaccagcttggacaacatggtgaaaccccgtctctactagaaaaatacaaaaattagctgggtgtggtggtgcacgtctgtagtcccagctactcgggaggctgaaggggaggatcttttgagcccaggaggtagagattgcagtgagccaagatcgcaccaatgcactccagccttggtgacaatgtgagacccttatcttttcttcttaaaaaaataagaaagaaaaagaagtggaagtcaagagcacctcacctggccctctgttccctcctagctagaacaagtctgcttctaccttctttgtttcaacaagagttcctgtgacacacacactatatatataattgtgaaatacataacatatatatgtgtacacacatcatgtggtgtatatgtgtgtatgtataagcacatgaacacatacaacaaactcccactcattgttttgcttgcgaccacgtctgtgcagcaaacacattgagtcttagcactaaagttgtgtcaacatactcaaagtcacatgtacagctgagctgaagggagggtgctgtcatctggcccaattttcaacgtctgggtgatgtggattttcattgctttggatcttaacgaggcattaatttttttccctcattgacatgcatagtcagacatagttaatctttgggacacttgctggtcagatgcctgggataagtatggattaagggaattctgattacccagagtgcaaggaaacttgggaattcaggcaacgagggggtgtttttgtaggtggcagagctgcccgtggcagagcaagttgtatccagaaaggattttgatcaatgaaagtttctgtgttggcagcatgtggggtttactgggaagatgggccccctgtgttcatgtttgcttttcaaacctgtctctatataggggtggaatctgaactcagccttcctgggactctaccttcggctctggttttatggccaggtgccacatctatggagcaatgctgctgcctccccatatgaaaatccttaatctactgaaaaacccagtcctggactagcctggatagagaggcagttctataaatcactatttatcacaaactttattgttagtgttccacagtggaatgtaaactccatgaaggtatgtcttaaaattatttgcaaatgaatggctcctcattgagaaggttagctctagacctcagccaggatgtgtgcctgtcaccaagtccttcctgcactcacagtgccctccacgttgtgccaggccctaggtggtctgagtggaacttgaccaaaaggaatctttcctccagtctggcctcagacaattcacccccactgtgtggggtaggatggatgctcttaggttttctgccatgatctgatgtcttagtagagctgtatgctcctggatttcagtcttgcctttcccagagacattctctgctgtcataaaagatccttcctttctctcacacacagcatcagtgatgctacttctacttgagggaggtgtggtgtcctctaacttcaattctaaagtcagcctgttgggcttggttaaaaaggtgctttagcccttcttggggagaatggagactctcattggagatccttgtgttggaggaggatgtgaaagtggattttaaagttaaatatatgtattactttgtaatctagcaaattgacttcttggcatatcttccttgtactttcttggatacgtgaaggcagatacaagaatatttattgcaacatttttgtaatagtgaaaaattgaaaacaatttacatgtccattaatataggaacaaataaaactgaatgcagccatactaaagaatcttatgcagcaattagaaagcatgagataaatctatatgtattaatatggatacgacttcaatggatatggcaagtgaaaaaaaagcatgctatggatagctacactggtttcatgaagtttatgttaagagaaataaagaataaataaatgattttgtattttctataagaatatatattttcatatatttgtaaatgattacaaaaggcctaagagtctacaccccaagtggattccagtagacactttttaggaaggagaaatagatttgcagaggtggacaacaggtatagactctgttgtttcatacatacatatatatatatatatatatatatagtaagtgtctgggtgcagtggctcacacctgtaatcccagcactttgggaggccgaggtgggcggatcaccatgagcttgagaccagcttggacaacatggtgaaaccccatctctactagaaaaatacaaaaattagctgagtgttgtggcgcacacctgtagtctcagctactcgggaggctgaaggggaggatcctttgagcccacaaggtagagattgcagtgagccaggattgcaccactgcactccagcctgggtgacaatgtgagaccctgtctcaaaaagaaaaaaaaaaaaagaagtgtatcttcttgagaaattcaacattctataagagttcaaagaattcaacctgtcttcaagtttactctacatacaaatctttgtcctgtcctccagaggactgaggctttaagtgacaatttgtgcagcatgagctgtgagtggatttgctgtgaaagagagagaagattaagacaagcctttgccttccaaagcaaaatgtttagagaaggaactaagacttatgccgaggaaatagggggcagagaatcccagagaggtgcagggcaggagggtaagggatccttctccccagcctggcccctggactcctctcactgctggttcaccagctccccaggatgggactcacctttgggctctctgtgcctgggagccactcccagtgatctcctcagaccacttcttccgttaaagcatggattagtctgtgatccctgggtccagaggatggaatggtgggttattgggaagggcaggagtttctgggaaggtttccaaaggggaggttgcacggagcctgtagggacatctttgttggagcaggtctgcattctgggggagaagcctggaacagtcagggatgtagtggcatgtgatttatggctaagacacacgccttgtctaccagccagtggttttgctttcaacagatcaaggtggccttgccacctaagcatttagcgaaaccctctttcttgtaccaaaagcctggctatggcccctctgctgctggagctggattggggtcagggcttcctgatatttgacttatagaaggttcaccaactcaaatgcactaggggacagataacagatgctggcaagtgccccttagagagaggtagagactggaataagcacacaccctctaaatacacacagccgaaaaattgcctaccattccatccaaaaatgcatgccatcgagccaaatttcccatgttgtgaatcctggttaaaggggagctagtgaagggcacagaatcaaggtttgtggagtgttggagttgattgctggtctcattactaagtgacactgacaagcacctaaccctcctcctcctgctgcacgagccttggttccacctgcaaaatgcagcaggaacacagctgagccacagggccgtggtgaatgattgtgaccaggtgatccagtgtggagcgtgccttgccctaagaaaggaattacactgtgctttgcttgaaaccaataaacacgcagtctttcatggcctcactcctcttacatcagctgaagccaactgctaactctctgcctcattttcacttcctaatgaagggaaatctaatatcagctttaggctggacgtggaaataacctagctcctccgatgtgaggagcgggtggaggagccgcggctcggctcctgcaatcctgctgcattgtctgccatcaccgctgggggcgtggtaggggaagaaatggtgcttagcctgtgtcctggtccccatgcagttgggagatggctggaaccccttccacctccttcagccgagacttctttgcaccatccaaaagggttaggactcccctcctcaccatgcggagaaaactttgggcggctgaccccaactctcctcacgcacagccaatctccttccaattctttcatcagcgttgggactgtcagctcaaacctgacaagtgacaagtctcgggctcatgctgactagataatcaaagtcttgtcagggctgtcaataccctgcagataggagaggacaaagggaggaaaggtttctacagaaaccgctgccttcacacaaacgctgtcgaagcctcttacccaaatcacctgtttgtccctaaacgtcatttactgctgaatctatgggctcaaaagcacaaaccctgaaaatgaaataatagcctgatattatacatagaaaatgcaaatttttctattttgtggacgattatcttgtaatataccatctaagaaatgcatacgtgtattttttggtaacaatcgcagtaacttggtggaagagattttttccagtaaaaaaaaaaatacataaaaaatctaaactgaaatatgccaattatgtagcatagacttacctgtgttgcatctttctggtaacacaagtaaatgaagtatgtattgcagcatctaatagatgcagtcgcacaggtgcataaatgtcctccaagaccccactttggtctcgctagcaaggatatgcaggttggtgagctaacagcctttacctgagagtggtggccccttgtccatcttcatccagacaccagcagagactgacataggccaaccagtctgtgaagaggaagaggatgtcagggtcttaaagccaagggctcagggagaacaggggttctggcatgagccccgtttcctctcctctcctctttccacacccaggtcagtgtctagccttcaccctcaaatcaaagcctgttgtctttgtaaaagggctcctgttcagtgatactaagccagcttccttccctggactggtggagcctccggtaaatgcaggtttaaacgtgagtgtgcagatgacatttcttggtagagagatggcccctggagaggagacttagagcccttcttgggcctgtgccttggcctgggtcagttcgtcctgggagcacttggtctggctgccctggcttaaccaggggagaatggtgggcccctgtcaaggcaactgctgagggaggctgaccccttttcactggaacaaaccaaccgcctctcctggcaccggagctcctgtgcaccagcctcccaccccctacctcacctccccctagcttttcctctccaaccactgtggttattccttttgtttcagacgatgcctatgtggacccacccaggatccctgcacttgctggtgcctctcttccctcctcctggcgaggtctcagcagggatgtctcttctcttctctggtcagctccttagcggtcccagcgtcccagagccaaggtacccctccctccctgccactctcattgatggccctttttgagcatcttggcaacactgacagctctctgcaatgttcttgctcctgagttcgcttccttgtttattacctccccttcgcagaggcacacaacgcaagtccagcggggcaggggccttgtccttttgctctttgtcccttgctgtttcccagcatcatggcagtgcctagaaggtggcggatgcggaaagatgacgcctctgcctgtggctggagttaggggctgaagacactgggaactcctgcctgtcggaggatgcacagggagcttctcaccccagggagggccacgggcatcttgtctgtgaagttggaactgagtttgtctccaggcctcagggacttctcatgcaatcttatctactgtgtgggccccaatcctcaccccaagggagcactgtgcatccttagtgctcattgctgcatctcccttcagatgctcctgggggagaggttcaggaaaaggtccagtacccatcacagcaggtatcatctgcttcttcacattgcccaccctgctccaaggcctgcgctaggtctggggcttatgaatagaaataaggctctatccctgccttccagcagcttatggtttagcgaaagagacaggcacataaacgtgtgagagattacagcgtggtcaggtagaaacaatgaggaagggctcacactcagcatggaatatcagggaagacttcctggaggaggtgacacttgacctggaattagatttcagaatgaaagctaaatagaaaatgggccaaaaccttcttggcacaacaataataatggagtgtgtctttgtgggtgccacacctgggttgcatctctcagaggctggtgaaatctgtaagcacctacactgcggtgggaaaggcttggttcttatgcaggaagtgtcacttctcagaccacagtgcttttgattcctgtggttctgcattcatcaggagcaggtgaggcaaagctctctgcttcagcccttcctgctcaaggccctgcctgagtcgctctttctctctggtacttctgcaaagttttttttgaaagctcctcttttcttcattgctctgtcctttcccagccagtactttaattcccccaaagctaaaactgactgtgtctctcccatctgcaccagcaattactctggccttgcttttatggtgctggggatggcaggatttcttcctgaaatatcgctcaccatccccaggcccatcaaattgcaggcggccatatttagaagggattcggagtgggaacaaggggtgtgcgtgagtgtggaagccaatattcccctgtctaatttatattttacatttctgtaaaatcatgcttagagtattttggtaatctctgcagagattaagtataatgctgtacatttaattgatataagtggtttcaattctccttaatatgacaaatctccagtgtgaaatattctttgttaatgatcaacataaaatagagttcatttttaatgtgagcacaagatttgaattaatttgtagctaaagcagggttattaaattttgtgtgcattctgtgcacaggcacacgttcggtcatacatgtggaccagggcatacatgcacgttatgggtaacgatgtgaggtgtgtgccccttctggtctgagctgaggctgtctatccttcctctctccctttgtcttagaagcagtacaagaaggggctgccccactggggtctctatctctgcaactccttggtctttggtacaaagggagcttcctggtgtcctgggttgtctggcctgagcctagaagcatggcaggtgtcctatcaaagctggacagagtctgcacaagccatagcaaggtcatctcctcctcccaactgtgtttctgacacagcatttactggtctgaaaattagcatattgctttacattataaaaaccatatgatggttaacatcatccaggagagttcaatgaaagttttgagttgaaaaagtttcttgcaaagtcatgtccagggagaaggccccggagcagaaccccagcagtgctgatcaaagccaagaggtttgcattccctaacctcagctgaattcagggcacatatgggcaagtgtgccttcccaagacgcctgagttagggagcatttacagaaagccagggccatgatctttggctctcagatccaaggtaagggcactctcaaaaaccacaactgcctccgtcagaggcgttcgaaccagtgcggctccatcttgaacaggggctgggtgaaatgaagctgagacctattgggctgcattcccaggaggttaggcattctatgtcacaggatgacatacgataggaggtcggcacaagatacaggtcatgaaggctttgctgataaactagcatgctgtaaagaaaccagccaaatctcactaaaactaagatggtgacgagagtgacctctggttgtcctcactgctcattatacactaattataatgcattagcatgctaagagacactcccaccagtgccatgacagtttacaaatgccatggcaacatcaggacgttaccctatatcgtctaaaaaggggaggaaccctcagttccaggaatcacccacccttttcctggaaaactcatgaataacccatgccttgtttagcaaataatcaagaaataactataagaatccttagtccagcagcctaagctgctgctctgcctatggagtagccattcttttattcctttgctttcttaataagcttactttcactttatggattcaccttgtattatttcttgcatgagatccaagagccctcccttggggtctgaattgggacccctttccagtaacacctcctctgctttgagataacagagggtaattttcctacaactgttaacagagaaaggggggaaataaaagcttcagggacaagtgccaaagtgaatttgaatatcgtataaaccgtgcctgggatgaggcagcaacttgcaggaaacatctgttccgactggaccctccgctcctccttgcagctggaacacagagctaagactccttaaacttttcctttgtgatgcaacccatggtggggagacagctttcaatatgcaagctgaccatgcagctcttcaatatttccagtttgtagccacctttttaatgatgatgggaactgaatcccaaaaacaatgagacctccccacgtgctcctagagacaaggcaggggtgcaggaggctgcacttaggcatgttaaatttctattggcttaagcagctgcagaaacaatctttaatcacgtatacaatattattggtgacaccgtgcaataaaagggctgaatgcttcatttttctagatttccttttatatttcaaaatcgcttttctttcaaattattgttatcttatacatttacttaaaaggaattacttatggcttcacttttttttttcttttgttggctgaccattccttttttaaattaccacctcacagggactgcagactttcaaacactttgcatatgaaatgaaaggcttgagtgtattatgttgcaatttttaagaatggcataattttaattagaaatgtatagatgaataaaaataatgctgctgcacgttactaattaggtattttattactctttgatttaaaaaagaagtatacctggttctaaggaggcagtgccatcagcttgtttgaagctcctggagaggaaaagggcatgaggaccggtggggtcatggtgaagggaggttgggggacctctcccgtgggaaaggttgggattgagaaggaaacatgtgcccaaaaaaagacaaatgaagagatactgctgagtgctgtgaaaatgatctctctttgaaatcagtcagcagcaaacactctaccattctgagcatctcacccctctgctaagctattatccaggtaatactatcctcactgaagcttttttccccttgaaatttatagataaataaataaggggctagctctatagcacctgctgtctgcttcaaaaggagtctgtcttttgtgtttaaagcagagacatgtatgatatgtgattgtcacctcagggcaatcatttttcccctggtttcctggttggctcaggtgagggtattctccccaagctcagctgtgagctctcagcaaggctggaaacctgtagctctgcgttaagtccctgaccctgcctgccatgctaccacgctccacctgagctgaagatagtatgattcagctgtggctttgtcagacgcatttgaaccagagcaactccatcttgtatagacactgggtaaaataaggctgagctactgggctgcattcccaggaggttagacattctaagtcacagaatgagataggaggttggcacaagatacaggtcacaaaaaccttgctgataaaacaggttgtgtaaagaagctggtcaaaacccaccaaaaccaagatggtgatgagagtgacctctggttgacctcactgctcattatatggtaattataatgcattagcatgctaagaggcactcccaccagcgccatgacagtttacaaatgccatggcaacgtcagaaagttaccctatacagtcaaaaaggggagggaccctcagttctgggaattgcccaccctttcctggaaaactcatgaataatccaccccttgtttagcatataatcaagaaggaacaataaatataagcagctgagcggcccatgctgctgctctgcctatggagtagccatgtttattcctttactttcttcataaacttgctttcactttactctatgatttgccttgaattctttcttgcacgagatccaagagccttctcttgggatttggatcaggacccctttcaggtaacagcttgatggttcagttagtgcttttggttgctgacatggtaaagctatggacctcccactggtaggaaggctcctctctgggatggtgggtgaacgtgagcagatcacggctgattctctacttcaactgcctttgcagccaggaggacccatggtgagaggccgtggctgtggtcaaggacctctgtgcccaagcaacaaggcacatttcctagactgagcaagagcagtctttgcgttggccctgccagatgtgtgtggtttgcatatggtcagggcagaccctccatcctgtaagaagcatagatttcttctaacttgcccagttctgagctatcacaatcactctcatctgtgtcgctgagctctgctcggcaagtgtggttcctcccaaagacatctcaccaggctgcaccaacgaatgctaagtccatatacttagcagcttcgggctaccaaccttgggttggtcttccctgagcccctgcatctggagccaggtgcactggaggaattatggggttaatagaggaacttccagagtgtggaacttctgcagaggggcatcttccaagaaaagcagagcggcttcccccattaggaatggtttgtggccaggaatctctgggctgtcacatccaattatgcagcctactaatcagcagagaacttgggaacatcctgactggggaagtcggcatctgttctaaatcttgccctcggagcaggagcagtgccaaataccacaaagactgcttagctgggtacaaaagatgctgtcaacaggccagaaatggaaagaagtcctgatttgatttgaatgaactattttttttaaatgggatagggaaaaaaaagtaattgaattacctccaataaaaataagctcccacattctttgagaaaaaaaaatatacacaagttgtgtctggttagaaatagagatattcactgctttggtttccagtataagtagcaaaattcatgacctcctcactcgggtaatagttttaaaaagctgtttctttgagactgcttggcaggtgatgtatatttccccaaacctaggctctaacctactttgtcaaacatgtcaatcatttcttctttcagcaatagctaaccaggggacatggcacactaagagtgacagttgcctgtgcatttctgtggtgtgaggttgctttgtgcctcagtgtggtccctagcagaggaatgaaccccttctccatcattggcctcacttttcctaactttggcttattattttggtcaatagacttttttttttttttttttgagacagagtctcactttgtcgcccaggctggagtgcagtggcatgatctcagctcactgcagcctccacctcctgggttcaagcaattctcctgtttcggcctcccgagtagctgggactacaggcatgcacccccacgcccagctaatttttgtgtttttagtaggggcagggtttcaccacattggtcaagctggtcttgacctcctgacctcaggtgatccacccgcttcggcactgggattacaggcatgagtcacgacgcccggccggtctgtggacatctaacaagaaaaacaaaaatttgttgaaagccttgacttgggttaaggctctgtgcagttgctggaagaccacattggcagagggtcatgatggagctcataggctacttgatgagataaaacattcctgtttgcaaactctcgtaacaatacaaaggacaaagggtggctgcatgggatggttcatcccaggaaagggatggaaattatgatctgcaaacgttcagagaaaggcagagttgggatggtcaggaaggtcttcagaaatgggatttgaagggtaggtagaatgtagcaagctgagaaggaagtgggcatggctatgaaggttgtgtgctgtgttcacccacaaggctccttgagaaggtattagttaaaaaatactctagttacatgatttccaacttttcagtaataatcacaataagcctgtagtaaagttctaatggcattggttcctggacctggttatatggccagcttcttggttcctattagcataaataagctgcacatatggagatgaggttgcatgacttgatgatttcagtcaataaaaaggcactggaatggactttctggtttcttgatttgtaaagaagggcgtggcatggaccaggggccatagcaatgatctccactctttatgcagggcacacacacggggtgagaagagctccagtgtcctgtcctaggcattggcaagccagaggcactggggagggctggcctgtctctggtcttccctggtttgcattgacatgttggttggctgctttcatatggggacatggagtctgatagctacattgcttctttaccccacatagggctttgggatcttttcagaagctactgcaagagactgggccatgggctgaccctccctagacttgaagacattgccctgcttttcagtctgtctctttctccctccttgctttgttgttctaagacctcttgttccaagaagttcacatcttttcacatctctgtcccaagcacccaacatacactggacagggggatttttttttaagaatttcaactcttattttagattcaggggtacaagtgtaagcttgttgacacggttatacacatgataccgaggcttggggtatgattgaaactgcgacctaggtagtgagcatgatgcccaataggtagttgtcaacccttgtcgccctccctcccccttccaatcactcccagtgtttattgttttcatctttatgtccttgtgtacccaatgtttagcgcccacttatgagtgagaacatgcagttctcataactgcatgcaggttttctgttcctgcattaattcacttaggataatggcctccagctgtgaccatgttgctgaaaacgatatgatttcattcctttttatgactgcatagtattccatggtgtgtatgcgccaccaaaagcctcatccaaaccataatgatttcaaaaagagaaagcaatgccggccccttccgataagaaggaatcagcacaagaactctggcaatgaaaaagatcagaatgttttcctacctctaaaggattgcacgagctccccagcagtggatcctacaaccagatttaaatgtctgaaaagtcaggcatagaattcagaatctggaaggcaaggaagttcagtgagattcaagagaaagttgaaattcaatccaaggaagccagaaaaaccacaaaggtcttatgtttctgagtggcagaaagagaggctgaccccaggttgcttctactttcagccctgcaactgtcccaatatagagaccactcaggagctgaaatacaaactcacatccagttaaacaattctcccatccatgtctgagtcacctccctggattttgtcctgtagttttatgtaccctgcgcttctctatgttctttatcaagcctgtcctccaggtaatcaattgatgcaatgagtgattagcaagctgctcttcacactagcatccacagacaccagtgtctcttcctggggccttctccctgaggaccaaagccaggaccttcttggaacacaccacttcccatgcagcctttcttggtgctgtctctgtgtttctcacaacccacagatcatggttttgggaaacagttattgagacatcatagattgccgtcactacttctggaaaattaggaccctactcctttgtttataaaatgaaaataaaatcctgttccatccatggccctgccactgagctacagcactctcattccctgctggtcaccatctctacctctggatcatgccatctctgtcattgtagacttcagctctttgttcagttatctccattacccagattcttcccaggactccatgtgaatttgggattctgtatgaatgctcagcgcaatgtatgatccttttatcacctcaataccctgcactacaatggccattttttccacccagcccttgactaccagtccttacagatgtaccgtccttatctctaactccagcctcttgatttcctaatgagcttgcttcattccttgggtcatcattgtggttggaccttagtgaggtttccagcccgctgagtcctgcctttctttctgtcattcttctccagagctctctcactccctcccccagctttgattctagagctcgtcatttaataatcttttttgtggtttgtctttaatgcctttggcccaggaaaggccctaataccagaagaacctcagtgttaatgtctcttgttcttataagcacagctgagtcttgctagagaaaaatcacaaaacaggacagagtggtggtcgaacaaatgttgcacagcaaaggcagcttcatttgggccccagctcttttccacagcctgttatatttgaacagtaaagtttagctactaccctatcacacaaattattcttgctgaggtgactcacagcctgttggataaatgacactaacatgtcagtccagccctttgccatctctcacagaagcccagtctgcggcagaattatctcaccaccctccagtccactatcggagtcctagagaatgttcaccagtgttttcctgtattttcaggcaaagtatttcaccttacagcaagtccagaggatggcagagattcacagtggcttctcttactgacctaacctgtcgctgagctctgtctataggaactgtgccagacagctcggttctcctgctcagtgatccctcctgctctcctgctgggtcctcgagtggacttgttctcttcttccctcttgaatttaggcatggctctttgattatgtctgacccctaggctgtggccagaacactattactcatgctggtccttgcagatccacccctcttgtgccatgacatgcactgcaacagactttgagatggagcccccatcagccagggtccctggagagtacgatgaaagagccccctgctaatgtgcataaatggggagtaagagcaagaaatatatttatcttattcttctatttcggttttttgttactgcagcataacttagcctaactcgacagatccagaagctgcaaaagttgacccttgaacggtgtcacaggtgtcaatcctatgacccattctgttgccaaagacccttagcgctccctactgcccactcctcccctggggtcccccttctcttatgtctctcttatagcctgagatgtcaatcattctctcctctgtctgccacgctgatgatggtctttgaggagggataacaaggatcagttgagagaagaaacagagcaaaattagggcttagagcccagctgtcaatcacagggatgtctggtgcaggagacagagagctgctgtgggcaccgtggcccctccagtgggggcccacaaggtgaagcaggactggagcagggagtgacgctgagaatgagtggcatcgcctctgggggagcttgcacacccctcccctcccagtgttccccctcccaccccccccgagtccttgaaaagggcttccgtggcctgtctccacccctgctcttatttgccatcctccaaagagaagctattagcctaggtaaacactccctctcccgagtgacttgatctctgtactccctgattcagttcctttgcaaggtaaataactataaatactaaaacatgtcaatagctttattaataaatgacttctggctatcttagagattctgtgctgtgggctttttcacgtattttatgtggcttaaccattgctggctgaaggatggctggaatctgtctagcacatcagaaatcacagtacttagactccccaaaatgttggccattcacggtgttaatgcttttttttcttggtataattttttttttcatttaatttggagctcacgtagcttataccccaatgtcaataccataaggcacagtgattcagtcatgcccatgcccatcttagcgttagaattttaaactttcgaaccctaacttctcatcagaatgaagcctaataaatcctcctcccaagagcattttcaaaaatcctgtgataaaatacacttatttctcatttgcagttaacttgaaataattttcatatttttttcccaaaactttatcctagtcatttttttcgggaattatcaagttttcttcaagaaaactgagaattgcaattcttaaaaccaagtcaattttctagataatgctttctgaaaatctaactcaatgtatctttttgtctttttgtctggttttgagtctcattttagaagaaggcctccaaggaacaagagtttcaaaattttccagaatgagattctctatttttcttgtggatttcccaagatccatatgcagccttggagcaaacactgtgagccccatggttttgacctgggcaggtgggtctgtcttcaatgctctgggcaagtctctggctacgcagagctccggttggaagtgcagagctctgacctgaactgcacattgtggatgttgtctgatctcagtagcaacactgacagcgttctcagacactcacatttctgtaggcaaagggaaactctttctccagtgtttcctctgaagacactaagctgcatcgatgttttctcttcttctttcccattatccagcaggttaccctcaacctcctcccaagaaaggagactgaatggagcacagagttgaccacgtcagactcacctgcgggtccttcagttactagctctgctctgtagtgactctccctagaaggctggcagggggcaggtgccatgagctgcctctgtctgggaggtaacagatctgacttatgccattaaaggacactctggtggatggacagataactgggaggcagtggcaagaggggaagcagagaagtcaatcaggaggctatggccatagcccaggtggaagatggtggtgccagacttagtgggatggtgaggaatttagagaggaggagaaggatgcattgattcaaggggaactttgatataaatggcatgaacttccttgcatagactaagtgtgggtgtgacggggaggtaggaattaggtgtgtcctgtaaacttttggcttgaccagcagggtacgtggtaatgttgagatggggaaaattgggcaagagataggtctgggtggaaataagtgttctagttggtcatgaaggatttgtgaagctgacagtgatatttgtagcagagaatccaaataggtagtcacctgcgacacctggggctcataagagagatcagatctagagatctagaggcactctcaaattgatgagattcaagtccttgaactggctgagagaatgacaagagggaatagaatgtgagtacagagttagcttgaagataatagttattcatttaaatattactgtagtcttttatttatttatttattttttagaaatggggtctcactgtattgcccaggctggtttcaaactcctgtcctggcttcaagtgatcctcctgctttgacctcccaaagcgaatagaattaccaacattttagtctttaattataggagacatggctcattttcaaaatattgatcaataaaatggagttccctttggaccaaccctaaattcctgtcctattttcatatttattcaccataaccagcattgcatatacctccttttggacctaaaatggagtacatacatttatatgaacatctagatatatttaaatagcatatttccatagagtactgtcttttattttcattaaatatgtatcttagagatcttcccatgtcaatacatatagatttaacttggtgttttagggtgtgctacttgatattttatagaaatatatatttaatagagatagggtcttactactttgaccaggctggtctcgaactcccgacctcaagcaattctcccatcttggcctctcaaagtgctaggattgcaggtgtgatccaccaccactggcctgttactccatagaattaatgtgctacagtttacctaacatttcccctactgatggacattcatattgtttctaatgttgcgctttgcattccaacatctagagtttgtgcggaggtcgtgtggagctcatgtggagatggagggccaccaaaggaccctgagatagacagtgtgactagagaggaggaggaggaaaaagaggaacatttacaattctggaagccaagagttgagagtattttggaaagaggaaggggtcgaatattttgaacacccacgaaaggttaaagaagtttaagatctagaagtatccattgaattggggaacatggaactcaatgttgacttgtcaagactggattaggaaaatgtggcacatatacaccatggaatactatgcagccataaaaaatgatgagttcatgtcctgtgtagggacatggatgaagctggaaaccatcattctcagcaaactatcgcaagaacaaaaaaccaaacactgcatgttctcactcataggtgggaattgaacaatgggaacacatgggaacacatttcctttatctttaccaaacatggacacaggaaggggaacatcacacacaggggcctgttgtggggtggggggaggggggagggatagcattaggaaatatacctaatgttaaatgacaagctaatgggtgcagcacaccaacatggtacatgtattcatatgtaactaacttgcatgttgtgcacatgtaccctaaaacttaaagtataataaaagaaaaaaaaaactaattcagtggacagtgagcatgagagccagacaagaaaggggtgcagagggaacaaagggggagacttggccaaggcagccctcttgggtgctacttagagaggtcgctgtgaacatgagctgggaaatgggagctagagctgcggaggaaatgggcttagggagattccccctttttttccttccttctttcccttcctccctccttccttctctccctccctctcttccttccctccctccttctttccctcccactccctgcctccttcctttcctccctccttttctcctctttcctctctacttccttccctctttctctccttccttctttccctcctttcttccttccctctctcactttcccctccctttcctccctctttccttccctctctcttttccttccctctttccttctctccctccctctcttcttccttccctctctccttccttcctttcttccctccttcctttcttccctccctccttccttccctctcttcctctctccttccttccctccctctctcctttcttccctttctctttttcttccctcccttctgcccttcctccttcttttcctccctccctccttccttctttcttcccttcctccctccttccttccctccttccctccctctttccttccccctccctctcttccctcttctctctctccttcctccctcccttattccttccttccctctctttctcttccttttcctccctccttccttccctccctcactcctttcttccctccctccctagtcccttgctttcctctctccctccttctttctctccctcttttgttcattccctctctccttccttccttctttcccttcctctctccctttcttccctctttccttccttccctccctccatccctcctttttattcctttctcccttcctttcctccctcccttccttttcttcctacctccctccatttcttctttcctccagttggcacatgtgtggcactgctgaagtcacacattctcagactctatttctgggtttcacattggaatgacagtaatgatgtctgtgagcacatagtaggcatggtataaataacgcttgagtaaaatcaggagcaaagtgcaccttttttgcagagttgtttcctaggaggaaaatgtgtgaagagcccttagaagaccatgggcacccaggcccactcagtccttgtcacttgtggccagtgactgtcacagaagaacaaagccttcagcaatgctccccgttcccaggcttgcctccttttggctcataaaccaaagtgaccgaggctttgggctggatgtagtgaaatgcacttggaggtgcctctggtcaaccggtcgaggagtggtggctcctccagctcctgtcccgttgtgtggtcaccgcctctccctccacctcatacaagtgtttcttcagcagctgcattagctccgtagagtcagcaacacgaatttttttttaaagtaaatttacttctgtagaaaagaaaaagaatgtggctattttggactttgatgagatgcactttgtatagctggaaatatgagtagaagttttcgtaatcaaaagcgaccaagcagaggctcctggccaggggatacgctgcaggaagtctgagcccaccttccagggaggtaacggtctctccacatccagggcagcagaggtgccgtggaaatagtgctccgtgccacttgctagatctgaccactgtgctgggctccagctgctcaaaacataaatcgtctttaaacacctggggcctgcctgcctcccgcagccatcttcgggccaatttgtcaatcctcgctcgttccatggtcctttttttgagccttgataatgcttctgaaagaagctggggacacttttgccattcatcaccaaagaacgcaacattctgtacatttattacagtatacattatgagcacactattaactaaaaaaaaaagcaaacccaaacctttcatttctctgaagttttcctttatctttaccaaacagataccgaatatgactgagaatttaataccctaaagtttaagacgggtttgtaaacatggtccctgctggctgctattgatcttttgctattttaatgcatttttactgaccgacatgtcctgtggtaaggaatattgcctaaattagttatctgattggttcttttgattaatgacgggcctgtgctccattacacatgacaacatgatcagaataatcactatcgctatccaagccaggcctggcattttttattccttcatttttaaagttcatttataaaattatttaatgtatacgtcctaagttgtaatttatttacatgacacttttttcgatgggaactgttgtactgtgtcacaaatggctaagaaaacaaggtaaactagatgtgcagatcaatgtctcttggctcaaggggaaaaaaacataatcaagattcaggagctgaccttgtaccaaagtccaacctgtcacagaacaaacactgagatacccaacaaatcaccaggcatggcaggacatgttctcctgcaatcccttctctccatcaccttctttctgcctggaacttctagcccttggacctctcaacttccttccttctgagtgtaaaataagacagtgcaaattcttcctggccctggctgcagcctgtgttcaccaagcgggcttcttgtgcatatgataatttggcaagaggccctatcagggatccagaatattcaaaatcagaatgtggaccacatctgaatgagaaaattgtgtgtgtattttaagcaatgacatgatattagttctggagaaatgaaaagatctgaatttagtctatccaatgattggataacaccactcctcagaggatctgctttaatgtaattatggtttggcttaatacaaacttggctgggtaataaaatgtaagttgtgagtaggtctggaatctttgaggcttctcaagaagatggctgtgttcaaaatttttctctcacccatgccctgctcaacttcgaaggaagatcaaggaagaaaagcttcagccctgctcctttttgagttctatcattttgtgaatttctagagtccagggtaataggctttttagggagccaacactgggcttccaagagccagctgtgcttttcctaaaaggccccacctctctgaggcaatttggcaaagcttctagccgcttctccattaaaaattattacttgagtaaaatcagacaagcctagggtcatgctagatgtattattatttcaaacaaaatttggttgcctccctatccttgtcttgctcttcctatctccccacacctgctctcacctgcagttgcctccatttcttctagaagagtccttgccatgtttctcaagctccattctgcccctaagacccaccccgccccccagcattggtctgactgcaggtaccagggaccctgggcactgcaatttcatgtcaacaaatggctcctaattcagtatctaacactgaacgagatgtatgaacggtatcagagcccaggaacatagaacctttccgttgatctcggagaatcctttgccatcctgttagcatgatgttgttagagactctagcatttcccggtggacacggtgggccctggccaggctgctgttgaacttcaacagaaagttcaacttcttgggtagaaggtcggatgggttgctggtgaccagtgaggtggtgtgccggagaccctacagagtggacagcacattttttcccacacacaatcctcaggggtgacctctgtctcttctcaggtcccagggagatggtctcacctccttctcaattcacatgagggaagctcctttcttaccaggtggagttgcagctctaagccctctgttttctatgatccttgtcaattcctggcacctttggcatgttaccatgttacaaaaaccaaacagacctaaagcaccctacgtttatgggttcagtcttttacactctacctgaacttcaaagtcaatagaagaacaacatgtgggtttccaagcgaaggcacttaaaatatagtgaagtggatttacatggtcttttttaccccctagacttaattaatgttgtaaataatacctcttatcttcttcataatgatttgctctgttatactattacaaaatttcattctgtcaattctcacagtcatttgcacagctcagacatgaaatagaactttggtgggacacctaccacaggaaacgcctgcaagtgtgtgcagagggtgcacgtgtatgtgtgcccttggacttgggaggcgttctggggtctaagataagcaagcaagtgagattatgttgaatatgcaagatatgttaatatgattaaatgactactggatcgcccaacataatcaattgaaatattcaccaactttgtgttgaaattggaagaaattattaccttgaggctgccaaacacattttgcagctttgaatttgcaataatgcgtgtctcacttaacatttaaaaacatatttttgactttaataaagtaagatgagtctattaaagagatattcaccagaatggaaggaagattcaaccagcagaggcgacaacgcagagaaagacacctgggcagtggtggggactgcttgtctcctcccttcctccctccctttctctgtccctctctctcttctttccttcttcagggacttgaggctgagttttccaaggggaagcatcctattccaagccattcttgttaatttatcattgcattatttgccttcactctcaaaatcctgcaaaatgatttagtctcttgatgtgatttacttgtgttttaaaactccatgcaacaccatcaagatcagagggatgtaaatgtgtcttctctctcactgaacaagcacagctaaaacaaatgaaatcaaagatgcatattcctttgccgtggctttgcaaaatgtaagtgatggaggaaggcagtagtcattcagctctgttctattattgacaacagcagacgtagaaattagaaaacaaatccccttttaaatgaaacgaagtaaaaggcctccctcactcagaggaaatactaattggagctaccttgctaatgctagcgagtcacaggaaggaaacattaagttattatttttaataatgcttacaagtctatccagccatttccagccagtgaaagatgtcagccttggccgaacgtggcagatctacttttcaccaaagatgctgctcgtcttccccctgatagcaatcattaattttattttttaacccagtcttcaaatgaagacagatgagctggagagttttaaatgcaggctgcttatgttcagaaaaatggctgtgagatgccagatcacggcatctaagctgaggccagttactgtttgggaagaaaagaaaaacaaatgtaagaggagtggcagagccaggcctcggaggggctgagagtgagagcagaaaagaaaagggtgcggggagcaggcctgtctcctggtctttgggtctgaccatttcataattgtgttggagagttacagatacaattatggttgattgatcttgataattttaacattacattttaatatttattttttattaacaaccttctcagtgtcagagatcaacatgcctattagatatcacatcattgatagcattgtgccatgtctttaagaaaaacgttttctttatccacgtaatttcatccaagccatatttttagtcgaatgtcaattagcctgatttgattgctatcattttatttttaagtcaaagattgtgacttgatctcactttaagctgctccagacagatttcaagtgacccttagcttagaggttgttaagagatctgcttacttgcattcagtagatcatctggttctcaaaggaaataggattaaaatgcatgtggctccatttggcaactggtttggggcaggcacaaggaagaagagaaaaaaggagaatattgttatgaaaagtgcttctagaatggtgaagtccggataactgcaaagctgtcccttcataaaagcagtgagaaaaatggcagaaagaaactgtcaaaatcaacattttcagaactctggaaattaatcagtggcctccaaccatctgaggagcatttattcaagataaatagctgagtcttggtgaggaataatgagcatgaagacatttgaatttgccgtttcctttgccctcttccccgttctgtggtggtctagggaaacatcagcctcacaacaatagtaggcatgaaaaccagcaatgtcatggccactcaaggggcagggagtatttgtagctcccctaaaaggtcccattcccaagagttcttagtatgttacccattgggcaaatccatagaaaagtcccattcactgggatggtctttggctcaaagatcccccagtgggaaaagctctatctccagggcatttgttgaagacaattagtggtctgacacagtaagaccagttggagcaaacaagaagctgttccaaaaacttcaaagaaaaatctagaaatgagatgactagaaaaggctttgaaaagatccagcaccttcctggggatctagaagacctgtcagagcttttgaatgcctcttgtatttagcatagtactgtgggttcttaccagggaaattaggtaagaaacaatacagaaaagacatccagattggaaagaagtaaagctgtttctatttacagatgacaagatcttgtatatagaaaaatccttaaatttttattctactaaaaaattgttagaactaatgaataagttcagtgaggctgtagaattcaaggtcaatatacaaaatctattgtatttttatgcaccattattgaacaatcaaaaaataaaataaaaaataaattgtatttacagtagaaacaaaaagaattaaaacatacttaggaataaaatgtaacaaataattgagacacttgtatactgcaaactataaaaccttgctgaaagaaattaaagacgagttaataaatggaaagacatcccatggtagtggataggaatgcattgaattaggcaatggttttaaaattgatctacagatttaatgccacatctaccaaaatcccagctgcctttttgcagaaactgacaagctgatcttgagacttacatgaaaatgctggagacctagaatagccaaaacattcttgaaaaagaagaaccaagttgaaggcttcatatttcccagtttcacaacataatacagagctacattaatcaatgcagtgtggtggtgacataaggacagacacataggtaagtgtaatagaattgaatgtcaagatataaatctttatatttactattcttggtcaatacatttttggcaatggtcccaaaacattcaatgaggaaagagtagtcttttcaagaaatggcactggggtaactaccatttgaggcatttgaacttgtcccatttctgtccccctgccccagttctgtagtagtctaggaaaacatcaacctcctaaccataataggtgtgaaaaccaacagtgtcacagccactcaaggagcaatgaggaaccacatgcagaaaaacgaagttggactcctacctcaaaccatatacaacacatagtcagaagtattcagaaatgtaagagttaaaattataaaactgttagaagaaaatataacagtaaatcatcatgactctagattaggcaatgatttcttgattatgaaaccaaaagcacaagcagcagaggaaaaaaatagataaattgaacttcatcttacttaaaaattttaaacaacactatcaagaaactgaaaatacagcccacagaatgggaaaacaaagcatttgcaaatcatgtaccttgtaagggtcttgtatccagactaggtaagtagccttaaacttaatgataaaaagatatccagtctattattgatttataatcctttgggtatatacccagaacttaagtataataaaaaaagataaataactcaattaaaaatgaccaaagtatttaaatagacattcctccaaaaaagatatacaaatgactaataagcatatgagaagctgctcaatatcatcagtcattaggaaaatgtaagtcaaaaccacagcaaggtaccacttcatgctcactaggatggctaaatttagagacagaaaataacaagtacttgcaaagctgcagagaaattaaaatcattatacattgctgatggtattataaatcgtttaacagttcttcaaaattgtaaatggaagttaccatatgactcaacatttctactccttggtatttatcaaagagaaatgaaaacagatttccacagaaaaacttatatgctaatactcatagtggtagccaaaatgtgaaaacaaccaaaatattcattaattaattaatggataaataaaatatatctacataatagaatgacaagaaaaaggaatgaaatactgatatatactatgattgggtgaaaatattttgctaaatcaaagcagccagtaacaaaagatcagttatagtataattttatttatatacaatgtccagaataggaaaatccatagagaaagattagcatttgccagaggttgaggtaggggtgtagggactactaatggctatagaatttcttttagggatgatgaaaaggttctaaaatgagatagtggtggtggttacatgactgtgagtatactaaaatccacttaattgtacactttaaaaaggtgaattttatgatatgtgaactatatctgtacaataaagctgttattaaatacctatgatgataaaagagaaaagaccatttcccaatttttttaatataattatcaactttggacagagtaaaacacctagaaaggatatgtttagtgtatccatgagggtcaagaaacccaacatttgatgctgttatcactgttcttgttatggtgtggggcatagttcactttcacagtgagtggggcagctcactaaagccggggctcccttgctcttctttgtctcctcccatgacaccctactccaggcacctgccataaagccttgaaaatataaggaccttaataagtaataggtgagtaaattggctaaccggtgaatgaatgcaaatcattaaagaggaatgtgaagtagtggtgttgatgatgatgatgatgatgataatggcgatgatgataataatgatgatggtgatgatgttgctgatcaaggtgatggtaagatgatgatgatgatggttatgatgatggtgatggtgatagtgataattaccatctttgtccctattaacaaatggtggtgatgataataatgatggtgatgatgatggtggtgatgatggtgatggtgatgatggtaatgatggtggtgatggtgatgatgatgatagtggtgatgaggatgacaatactgatgatgatgacagtgataagtagtagtagtatttctgtagaggctatcaagattagctttgaaagaactcttcagagataaattctaaaagccatttatgcaatggataaattgccaaaatcagtgttaaccttccaaagggttctactgtaaagctcagctctcgtacaaaagtctatggcttttaaaaatatttattaatacttttccagctgatatgtaaggcttagcaaagaggctgggcacggtggctcacacctgtaatcccagcactttgggaggccgaagacagtggatctcttgaggtcagaagttcgagaccagcctggtcaacgtggtgaaacctgtgtctactaaatatacaaaaattagccaggcatggtggtgggtgcctataatcctggctcctcgggaggctgaagcaggagaattgcttaaactcgggaggcagaggttgcagtgagccgagatcatgccactgcactccagcctgggtaacaagaacaaaacttcgtctcaaaataaataaataaataaataaataaataaataaataaataaataaaatttaaaaaagagttagcaaataaggtgaacacaaaaaagcgattttaaaaccatttttcaaattttactactctttgatatttatttgtgtcctttccttcccttaacattagtttttatattttagaggaaagaactcaggtgaagaccatagctggtcctcctgtgtcactgggttatgtctgtccttgactaccagcaaggcctcctgctattggttagatttctgatgtaccatactcttttgtcctgtcctctagtattttgggtcaagtgaagggaaagtcactgagtctgcttgttcccaaatgtctcacctcaaatcttctcctcattttctctctccacctgctttctcttcccccattgtctttttctgtaagtgagaagggtagaggggacacggagccagcccccttttcaaactcagaaaacaaggcttaccaacacacatagagaatattttttaaataaaagccagcatcaggatgggtggctgagaaagaggggtctacattagggagaagataatctttgtccctattaacattgtcagtggcagtaatttaataggattctgtgctatgtctgtaggaaattcctgatatttttcaggtatagaaatgattgcaatgacactaaatgttctttagtgtcactaaagttttgcctaccttcagtactacatcattagaagattcacctccttttcatctccgttgagtagacaagtgaccaaaatcccagcatagctatgactgtttcaatcattgaagaaaatttgctggccacgggacaaaattgcagtagaagtgactttatgtggtgatccaaaaatgagataactgtattcttctcattcctagcggaagtcaactctgcaggaagagacactgcttttgggaggcaaagttggcagttggttttctgatcttggtttgccattgaatcacctattccttgaggacaaaaaaagacttgtgtccaatgactggtcaagattcatcattccactggtccattttaaaggcttatctctcatgctatctatataactgactccaggaccatctccaccttttggaatatcctctgattacttcatttctttgtttgatttgcatttagtttttgtaagaagagcacttgatggggttattttcctcctgagcatctcacagtggtgttgctttcccagctctgtccatcattggtttgtgctcatggctctgtaatgtccctttgtcttttgcactttgcagagaagggtatggctggctctacctatgagtgcaccagggtagtaaggcaagcagaacaagaagctatttgcatctgttttctcatgaggtagctcagtccccatagttactattcctctttcctggccatttgctaccctaaggccagcaaatcttttaaacatgaaaatcttatcatgtcattctcctgatttaattcattaatggcttttcatttcctttaggacaaaactaaaaatccttagcctggacaattaggttcttcatgatcctggcctaggctagctctccagctccatctcaagtcatcactctccattgtctaggaatgctggcttccttcttctccaaagggagggagctcccttccatctctgagtgtctgagccttggcagtcgccattgcctcttccgctagcactctgtcctccaactcctcgcttggctcactgtccaggtctcagttaactgccactgcctcaggaaaattttctgtggcctcccacactgggtgccacagtaacacattgatcataaacctctgctttttcttcaaagtccttgtcaaaggtctagttaaatattaaataaatactaataaaaatatgttttcttaacataaatgtgaattccatgatgccagactatgtctcattcctaacagcatctctagcgctgggtacagtggtgttcaacaagcattttttgagtgaatgactgaataaatgtttttttctttgtccttctccataagctctaagaatcatttgtgctgggattgtgtcttaatattctcatctctatgcatggcatttttcccagagctgttggctgacgactggtcaaatccaagaccttgatctcattagcactatcctcccaccagctcccagtcgtcctagaagtgcttagaggtggaggcacagccagtgccaattccaagatttctcaaagaagtcttaggagggtaatactttcctcactgtatatttgctatatagagctagcgctacccagtgggacagtggcaaacccttttggttgcctaaccaacagctcttccccacttctttcctgttggcagggactatgtttatttgggtacccaggtctccagcatgatttttaattgggtgaaattatcccagctgcagaggaaaaccccaggtgatatgaataaatagttctcaaaatgtaatctgtagaataccagggatctcagggccctttcggggagcccttgatgtcaaaactattttcatgataatactaagaaatcatttgctttttttcatgttgacatttgctctgaaggtaaaaaagcaatggcgagtaaaatttctggtgccttggcaccgatcaaggcaggggcaccaaactatactaacagacatttcattcttaactgccatactcacagttaaaaagtttcagttttatttgagaatatctttgatgaaatagcaaaaactataattattattaaatcttgcctcttgagtacacgtcatttaattattctaagtgaagaatgagaagtacaaaaaaaatcatttctgctgcataccaaagtacaatgcatattgacatctcaaggaaaagcccttgggcaatggtttatgttgtaaactgaactagctggcttttatcacggaacactattttactttatagaatgtctgaccaattatggctattcagattatggtatttggcattttttttttcaaaaatgaagaaaggaaaatggttagtagtatttcttgccagtgatagaatttaagttttaaagcaaaattataatttttagaaaaaattgtatttgccactctgagctcaatagctctgcaacatcttaagaacttctgatgagatgggtgaatatattaacaaatatgatttttcaatattgtgtaacaagaaatgtcaataatgaaatatctgcataattcattgaaccaccgtattgccaaacaatcaatgcacggtgttacaaaaacatacctgggtaaaaattattttaaagagcaaggtcgatcaatagatatcaatgtaacagaatataaaagttctttgatatggcctcagattctacactgtatctaatctttgaaaagctaccccttgtaaagttttagtgtagtatcaaagaagaatgttcacaattgtccaaaagtattattaaaatattcctcctttttgcaactacatagctgtgtgaggccatattttttcatgtactttaaccatgcaacatattatagcatattggatgcaaaagaagttatgagaaatcagctgtctctattcaaccagacattaaagagagttacacaagtaaaaaagaatactagtcatctcatcatttttttcatgttggaacacatagttatttttaataactgcatgctctttgtattaatatatgataagtttattttttacaaataatttttttttaatttttttggttttaatttctaatggggtaaattggctgggtgtggttgttcatacctgtaatcctagcaatttgggaggccaaggcaggcagatcacctgaggtcaggagtttgtgaccagtctggccaacatggtgaaaccccatctgtactaaaaatacaaaaattagctgggcaaggtggcgtgtgcctgtaatcccagctactagggaggctgaagcaggagaatcactttaaccctgggaggtggaggttgcagtgagccgagatcatgccactgcactccagcctgggtgacagaaagagactccacctcaaaaaaaaaaaattctaatggggtaaacatatgtataaataatatataatacaaatatttattatataatatatataaatatataacaaatatatgtacttttattataggtttattatagatttagggagtacaagtgcagtttcgttacatgtgaatattgcgtagtggcgaagtctgggcttttagtgcagccatcactagtgtagccatcacccaaatagtatacatggtacccattaagtaatttctcattcctcacccctcttccaccctcctaccttctgagtatccaatgtctaccatttaatggagtaaatactgatagacataatttacataaacaaaagcttgataatatctggtcagggccaatcattgtggttctatttattaacggtgattgctttgggcataggcctgaaatgagacgtagtaaggagttctgctaggcggaaagtttacttttatagtgacacacgagaaagagatggtctcttttcgtccactagccatcactgggttggcatgtgacagctagaattgtggcagtcttcttatatgaccacaagctgacacaaagaaggtagtgaagtgaaagaatgaaagtaacgtgggacttggtcaacattgctgcactgcaggattaaccagccctggagccatcttgtccctagaagttttgttacttgtgataacagggttcccctattgcttaagctgttcgcgtacagtttcccttaatagccaagagcattctgatataggaatttgttcctaaactttaaacttataaagtaactcacaactagaataaagagtctttttttttcctttgacttttttcagtatggagctcacattcatatcagcctccaagatcattagtgctctatgcccaatctcttggttttatatattgcagttcatatgtgggtatatgggttttcctcctcctagcccttcccaccatccaaaccagcagaaaaataaatagccatataaaagaggtgaatgttatagacaacaaaaaactgccgggatctatgctgcacttcccccaaagagtcatttcagtctattaggcacataacgcatgttttaaaaaagaaccagttgtaaatacatatttgttcagatggactgcagcacaacagagagtctcccggggagagaggatgtattttacaacctgccaaaaaagatcctgcgaaaagtaaaataaggacaaacggaaaggtggagaacccctctgcccccagaaggctgatggaagcacagtccctccgcagtgttgttatggttggcctgacattctgatgcccggatctcagaggcagatctaagagccacttgtctccttgatgcctgagaaccattcagcccaaatgtgggattccaggaaggatgatggagtgagtattcaagtgaaagcagctccaggcaatgttcttgagccccaggagggggctaattcctctggtgaagctggaatgggctttttttggctgtgggggcatgaacagacgtgaagaacctcaactcatctggggttggttccagttgcctccatcaaacttaaagtagctcaggacctactttttgtgtgtgagtgaggtgtccttatgccagactactgtctattaccactgctttaaataatagctatagccaggacccctagcgccttacactggaacatgcctaggaagtggcattagctcaataattagtcccattcaggagagaaccttgtggcagaagcagtgtctagtgctgaatgtgagcccctcgaagtggggggaccttctcctatctttactttgtggatatactatgccccttcccttctgcattttgccaggattcatgagctttggggtataattggaatctccctaagagtaataacttagttaaagatgtacatttcctatggagtcaggaggaatgtgactgcagttggtcccattaagtgatgatgctaaggttgttcacctggtgaaagtggtgactgccaagtctctcccttgaggaggttccttctgctttttgtgatcagtgaatagtctgtgggttgatacttggacaccatgtaaatatcctgttccccaacgatcttttgactaatggtttttggaccttccgtaactgagtcaattattacatttttggttgcaatatggtgatttttctaattcagtcattacttctacagttattagcttatgttgataaggaactaagaatctatctccataaatttgtggattatttttctgtcagtatgctataatccattagcatcactattctttctgacattaagattgccttcagtttgaccagggagatctccttcagctttgagcacctccttattttctgttccaagatcagcttgtctattcctgcctcggactggaaatgagtcattgctccaaggatccttgtttccttccagtggggagtggcatttagaaaccacaatctgggtactggaagggctcattggtactggagggtcattgttcctaggacatttcggtcaaaagaactagaaaatgtaatgtttcttttttaaattaattaattaatttatttttttttgagatgaaatcttgctctgtcacccaggctggagtgcagtggtgctatcttggctcactgcaacctctacctcccgggttcaagtgattctcctgcctcagcctcctgagtagccagcattacaggtgcatgccaccacacctggctaatttttgtatttttagtagagatggggtttcaccatgttggccaggctggtgtcaaactcctgacctcaagtgatcagcctgcctcagcctcccaaagtgctaggattacaggtgccagccactgtgcctggccccattttatttctttctttagcaaaatcgggaattcataataagccctccagattacttctaataacataggcgttttccacacttcctctagtctatatttgtatctcctttctctcttaaggaaagttctagtttccaataacactaatatatttacttatttgctctgtgctacagtacatatacaataatttcagatttactaatcgttgatgccacaatcaacacaatcttgcaaactaaagtttaagacagctttgccttgtggtcagtagttgtcttaccaatatgttgaacgtaactccatccatgagtaaatatcaaaaaagtctagatttgataacgttgcaggggacaactggcttggattcttcaacagaatcaatattatggatgtaagaagaagaaaaaaggtaagggaaatggtataagtaacagaagacaaaagagacatggtgaccaattgcaatgtcaaatccttggttggatcatggggaaaaaaattccccaaaggacaaacagctcaatataatcatggattgtatattacataatattaatgttttgatactaaatgtgttgggtgtggtaatgggactgtgctataagttgcatttatggatgagggctgcatttggtgacaattctgagtcaacaataatgcttattgttttccttatcttccttttaaagacacaactcatgagaaattaaaacaaatacataacttcaagtttattgatagctgataggtacatacttttgatgttttatcttaaactacgtttaatctacttcttaacccattcactaattttattgactacattttatttctagagctttatcaatttgattctttttaaaacatctttatgttctattttcaaagtatcttgccttgcctccaccccaggagtttaattctttttaaagaatgtcttaagtgttgaagatcacttaaacaaatctactttatctattactctttaaattgacattccattatctcaactttgaggctctagtccacctattcattgtttccaaggatactcctttctaatctgtgctttctggtctgcttggtaatttttgattgagagttcattgccattgtcagtgtgtttttctttttttctcatgagaagcccaggtggacagtgttatgaagttattctcacagaggttttatgtccttggcttcttccattgtctagggccatcactagctcaaggcaaatcttatattaattttggagggcttagagttttctggatcctccagagattgaaaatttaaactccaaacagtcttaggctagggttttgaattctcaagcaagcatttagacccaaaccaatgagtaagctcctgtctcctttccccatgatggtccatagtttttgttttttttttttcacagagccttccttttaactgagagtgtagctttttaaggatcccgtcttcaagtagggattatggtccatctcctctccataccagcctaaggcctcatctttagtctctacatagcctttaaaactccagccctggggattgccccaaggaatactattatgggttgaattatgtccccttaaaattaaatatgtttcagtcctaaccccagtacctcaacaacataagatcaaaatgtgaccttatatggaaacagggtcttgccaaaggaaatcaagttgaaataagatcattagggtgggccttaatccaatatgactgatgtccttatagaaagaaaaaatttgggcacagagatagacatgcacagagggaggagaacttgaaaacacacagggagagtgtcatatgaagacagaggatggagtgatgtgtttacaagccgaagaatgccgaggctaggagaagctaggagacagttgaggcacggttctttccttgcaccttcagagggagcctggccctgcggactccttgtttcccacctcctgtcctctggacctgtgaggtgatacatttttgttgttttaagccccctggcatgtagtactttgctactgcagccctaagagatgaatacagaaaacaccctccccagttcctgcccctcactctgaaggcagccctgacatcagcacctcacaactcttacgtttagtttcctcttcacttccaacccacgaagattccttttttccaaccacagctttgcattgtcaatatttttggatagttgcatgctatgcagtgtttctctgcacttgtagtgggagaggtttcatgttatcttagccccccctcagctcacattatgaccttttgggcattaagaacccaagaaaaaatgagccaggcatttctagaataaaaaggcaatttcttcaagcacgccgccctctagggccatgctgagcctcgccaagggcagggcctggggcatgttgtgttgtgttggaagtgccatgaacacgaggctgacagaggccaggcaagtgacagaaatatgcaaagctggccaggtatataacaggccaactcttttgaacccctcaggcttcatgacatagcttttatttttctactttacctttctatttttaaataaatttattttatttattgttaagaggcagccttactctgtcatacaggctggagtgcagtggcatgaccatgcctcactgcagcctcgaactcttgggttcaagggatcctcccatctcagcctcccgagcagctgggactaaaggcatgcactaccatgcctggttaatttttcacattattattattttattagagagatagggtcttgttctgttgcccaggcttgtctggaactccaagactgatctatctgccttcacctccttatgtgctgggatgacaggcatgaaccaccacactcagcctgtttttctactttgatattctactgaatatcactttgtttaaaattctcatctaaggagaaccatcatgcaaacttaatgctaaatggcaactgcctccaagatctagagatactggtgaactcattgtgtctacctaaagggcagctgccactcagtacctgcagccattttgtgaaatattgtcagatctctatatctttcaaaataaaacaggaattcagatctttatgtgaaatctcctgatttgaaaatgttggcactaagaaaggattcaaaagttttaaaaaatgctttcaggcccaacaacatatattcacctactactgacttcaccagtttgctaaacacaatttgatgattgactctccaaaattactagctttataattttactgaaaagaaaactattctatgaagccatggtagaattttgcagttctctctaaacccctttgaaacaatttacacatttttctgtggcaaaaaaaaaacaaaacaaattttcaatggttgcacttttcttggttatttatttcttataatacagagaagtctttgattctaaaggcatgtgtttctttaaggaaaatgataaagaataaaattaattggaaacagccgttgcttgaccctcaagttctgaaaacagacggaacactcaaggtcaacattgaaactctgagtttaatttattctgttgtttttcttccttctccttccccagaacattccatattttgttagcttctgtcagagaaatatagcttcatttttatccacctctttgggcacaggtattagccaattgtgatgctgaagagaggtgtgattgccaagtccctgccgttggcacagtgaaggtggtgccttcataataccctcctttgcagtgaaagtctttttccttcagtattgagcagttgggtctctcagaacccaactgaggttgcccacagcctccatggatgatatgtaaaatctgctactttgtgaaacacctgtgtggatgctcagtgttggttacaggtatgtctttaaatacatgccttcttttctatgcccactgaccttctatgtagatatcctcaggacctgtgggcccctctctgactgtcaatctgtctactgtctcacaccatcattctcatgatgcagctggagtcattgatcatgaccttgtcaatcaatcaagtcaatcacaaccttgattaaaacctttgatgggctgggtgtggtggctcactcctgtaatcccagcactttgggaggccgaggttgagagttagagaccagcctgaccaacatggagaaaccccatctctactaaaaatacaaaattagccgggtgtggtggcacatgcctgtaaccccagctactcgggaggttgaggcaggaggatctcttgaacccgggaggctgaggttgcggtgagctgagattgtgccattgcactccagcctggggaacaagagcgaaactccgtctcaaaaacaaacaaataaacaacctttgatgactccattacataaataacaaagaccaaaacccacagcagagcactgaaaggcctttataatatgtcccttacctaattcaccaagctttcctcctggcatgatgcctccattcgtactgcattgagctcttttctgtctcccctgtcaaagtggcgtgttgaactgcatgcctgagttttgaagaagtacctttatgcacccaacagcatagctccacacatacaaagcaaaaagtaatagaaatagagggtgaaagtaataaatcctcaattatatttggagatatttccctgaactttctcggaactccataaactaaaaatacacagattaaaagaaaaatgagtagtgttatttaaaaaataaataatacaaaataaacttgactatatgttgagtgtatatgcacacacttactgaacaatagaaaacactattttctttttttttaagcttttattttaagctcgggggcacatgtgcagatttgttacataggtaaacttgtgtcatgggagtttgttgtacagattatttaatcacccaagtgttaagcctcgtacccattggttattcttcctgatcctctccctcctcccaccctccaccctccaatagggctaagtgtgtgctgttcctctctgtgggtccatatgttcttatcatttagctcccacttgtaagtgagaacatgcagtatttgattttctgttcctgcattagtttgccaaggataatggcctctagctccatcatgtttctgcagaggacatgatctcattcttttttatggctacatagtattccatgctgtataaggaccacattttctttatccagtctaccattgatggacattaaggttgatccgaagtctctgctattttgaacagtgctgcagtgaacatatgtgtgcatgtgtctttataatagaatgatttttattcttttggatatatacctagtaatgggattgctgggtcaaatgatatttctgtctttaggactttgaggaattgccacactctcttccacaatggttacactaatttacactcccagcagcagtgtataagcattcctttttcttcacaaactggccatcatctgttattttcaaacatgtgaaatacatacagaaatgatcatgcatttagccccaaaggaaatgtttataaattcttcaaatcagaaatcatgaagacagatcatgttaaaaatccagacttctaaaacaatccttgagttaaaagagatcaaaataaaataaattcacaacaaaaatgagagtcacccaaatattttaaaaaataaagctaatggtaacaataaaaaacttaagtaaatatactggaaaagagaaatgggtgcaattaaattaacatgcaactcaagaagacagaaaaggaacaatattataaacccaaagaaagtaggacatggttaatgataataacaaatctgaaattaatgcagtaaaacaatagctttaatacctgattctttgaaaagacaaaaatatcagatctatatggtcaagaagaaatagtatatacataagataaatgatattcaaaatgaggaggataatataacttcagataatgaggagattataaaattaagtgggcattattacattctaaaatatagtcacaatcaaagtatttctaataaatacaaattaccaagattgaatcaaatggatgaccagaaaagcccaaaatttctgaaagaaatttgtaaaaatagtgaaaataatttcttaaaaattgcatcagacctagagtatttgcagataaactgtaccaaaccttaaaaacaaacaaacaaacaaacaaacaaacaaacaaacagaaaatcctatattccagggcctggaaaaccatggaaaccttcccaacttattttacaatggtgatatttcccttccctatttctcttctacaagagtagaataaatttttaaattatatgtatgagcatagatacagaaactcaaaataaaacatattcattttgctttttacttagttgagtttattttaagaataaaaggatagttaacctgatgaaatatactagtatcagtaacaaaattcacaatttaaaatagaaatcctggtcaggagaggtggctcacacctctaatcccagcattttgggagaccaaggtgggtggatcacctgaggtcaggagttcacgacaagactggccaacatggtgaaaccccgtctctactaaaaatacaaaaatttgccaggtgaagtggtgcatgcctgtaatcccagctactcgggaggctgagcaggagaatctcttgaatccaggaggcagaggtttcagcaagccaagatcgcaccaccacactccatcctgggaagagagcaaggctttgtttcaaataaaaaagaaaagaaaagaaatcctatgtaaagatgcactaaataaaattaatctctcatttgtgaaagtcacagtaagctaagaaaagaagaaaacttaacccaataaaaagtttgagaaatccaaattcatgctgcaaaatttaaaaaaaaaatgttttatttgaagtctagaaactaaacaagatgcttattgaaatcccagccactgaatatggaaatagaattatataagtggataaataaaactaccaccatttttagctgatatgttttcataactatcaaatctaagtaaattccttggaaatatatttgaaggcaattggatacaagataaacatacaaaaatagtttttctaaacaacaacaaaaacaacaattagaaaatacattatgaacatatcccatttaatagcaacaaaaaacatacagcatctagaaatatagctaacagaaaacatgcaagacttgtaacaataaaactataaaagtttataaaggacttaaaggagactagttaactgaatagtagttagagatgagaaggctcaataagcaaagatgtcagacctttcaaaattaatttttcattcagttagctgatgctcttctctcttgggctggagactgctttcccaggaagcaaaatctgcaaccaagacttgcctgcaggtaggttatttttaggaaatgttccaacagtgcctggagtaaaagggatggaaggctaaggaataagagtgtctggtataattgccaaccgcatctcagtaagaggtttttaaaagaaacacaagaagctgattctagaatcatttcaaagaaagattggagaagaatcatgaagatttttcaaaaaggagacaagtgtccaggcgcagtggctcactcctgtaatcccagcactttggaaggctgaggcgggcggatcacgaggtcaggagattaagaccatcctggctaacacggtgaaaccctgtctctaccaaaaatacaaaaaaataaaaaaaaattagccgggcgtggtggcgggtgcctgtagtcccagctactcgggaggctgaggcaggagaatggtgggtgaacccaggaggcggagcttgcagtgagccgagatcgcaccactgcactccagcctgggtgacagagcgagactccatctcaaaaaaaaaaaaaaaaaaggagacaagtaagttaggaggactaatttccccatcaaaattccacacttaatctaagggtataaacattaaaaccatgagtattaaggaagaaaaaaaaatcaatggaacagactaaagagggaagaaatagaattatgtaattgaaagtttagtttataacaaaggtggcaaagaatgagccagttaactaatgatgaggacgactcattgttcatttggaaaattagacctccatttcataatatgcaaagtttcaccttgcattaaaaagttcataaaagttatcaaaacaatcttttgatgtaaaacatattctgcaataagatatgaatcccagagtatctgaaggaataaactgacatatttgactacattaaaacaaacaaaaatctgaacgaaaaccaaatgatggattgggagaaatatgtataacataaataataaaacattaattactattcataatttctaaaacactcctaaaactcagtaagaaaattaaataattccatggaaagatagacaacgaaaatgattaggccattcagggaacagaaaatacaaatagccaacacctacattttaaacattgaatctttcagaatatcagagaaatccaaatttaaacaagattgcccctttgtatacattagaacagtaaaattttaaaagtctggtaagtcctgagcaggctggaatacaagagaatataccatgttatctaccactcaggaaatgtcaattagcccttttagcagaaagagcctgcatttaaaatgtacacagctttcaagaaagcagttttaattttagaagtctaatctacagaaacactttcaggattgttcaaagatttatacacaagactgcacaccaaagccttatttgtaataatgaaaaatattacgagcaccttaaatatttcataagttatggtatgtccatgctatggaatactaagcagctgttaaagagaataacgggtattgttttgaaagatctttgaaatacattaagtaaaaaaaattcagggtatatgataatatgtataataatgtattctcatttatgtggaaatccaattatatagttatatacacatatttatagaaatgagtagaaaaaatgactgcaaaggtgcgcatctgattgttttacagtgcttacatctgaaagaggggcatggaggtagggttaaaaatatatttgggggttttcacatttattctgtgtatttcagtgatgtttaaattttttaccattttatgatgatgtattactgaggttaaattttttaaaaaagatatgcaatgttattactaaatattagttattcctatctttattaaatcaatgctgaacaaatatttcaacacatcagtttgaagcggcccatgatcagtgacttgtggagggcacctgcaggtctccatctgctcacactggggtgcctccaggtgggataggctaaaggtatgtggccaggccaatgggccggagccctgtggagacatataagaccctgataggcacgtagtaacacaagctcgcaggacatacatagcaccccatgtaggggaatacaggcaagcaccatagtgaaaaacagctttttgctggctcaggacaagcgaagcttccaggggtctcatgtgaaggaagtgccccggctcaccaccaagccccttggggtggctgtgcccgacctccctgtaaacacagtatgggtgagaccttcagtgctcctgacagcatgaccccaggggctagctgggagctgcatggcaggagtagagggaccaaagacagcactcggaccagcatcctggacgaacctcctgcttcatgtggatccagagccttgaaccctgtaccatccacagggcctccagcatgcaggctgacaatggctgggtgcctgtgggcattttgggaatccctgtgtcattaaaggagctgggagacaactgctctacagagcattgagaagcatatttcattttccaaatgctttaaacatcacccctccgttttgcaggcacgccgaaccaccgtgtccctgtgtgggtccttgagtgctggatagtgtcagggacctcggatgtcttgccctctcattttctttggcaacttggcaacccaaacagtcacatctactgatgagctcatccaatagaatgaataaacccttatttctgaccttagcacatatctgaatcgtcctccaattttaccctccccataatgggcctttctatttgttttctcagtgtgaaaagagatataacttgctacaaagaagcttcctgcaaaagctcactagtaaggcatgtatgcatctctagagtctccagatggtcctggatgtgtgaattctgcccattgctggccgtgaacattcaagggtacggcatgatgtcacagctgagtcacaggccgaggagttcttgagaccagagctgcattccaccctgccacttgcagactctgtagcttatgcaaattacttagcgtttctgaaaatggggatactaatttcgactctgcgtggttggtgttcagatgacagacaatgtgcaggaggtgccagcattacctggccctttaagacgctatagattacgtctattatactattatccccaggactgccacttgcaccactgggcctctttccatagggcaggtcaaggccctggtgaggaagaccagagcaatctaagaaagcatgaatttttcctctgagagacatagaaatgaacttctaaaagtggaaaaaatgtttcggtccacggcactatcccaggctctttggaactccaacagaccagctcacaaacaaaaaaaaaccctaatatgaaccaggtactgtagctcgtacctacaatcccagcactttgagaggccaaggcgggaggattgctggagctcaggagtttgagaccagcctgggcaacacagtgagaccctatctctacaaaaattgcaaaaattagccaagcgtggcggtgcatgtctgtggtcccagctactccggaggctgaggtgggaggatcgcttgggcctgggagacagaggttgcagtgagtcgtgattgtgccactgtactccagcctgggtgacagagtgagactctgtttcaaaacaacagcaacaacagcaaaaccctcattcattagaactgttttctcatattagtattattcatgtaatgttcttttgaaaataaacatttttttaggccgggcaaggtggctcatgcctgtaatcccaacactttgggaggctgaggcagggggattacctgaggtcaggtgttggagaccagtctggccaacatggtgaaactctgtctctactaaaaatccaaaaaattggctgggtgtggtggtgggtgcctgtaatcccagcttctcgggaggctaaggtaggagaatcacttgaacctgggaggcagaggttgcagtgaggcaagatcatgccccattgcactcctaaaatgtgttttcttttgggagaggaggagagagtataatgttgccttgaggataaggcaattctctcactattgcgtttctctgaccctatacggagaggcaatgaggacatgcagttcagtggtgaggagtgtatctcagggcaagcctcttgtgtggggggttgggaagttatgaggctttcctaagtcttatggaagaaattgtgatcgttgtttcatttctttgattttacagaattgttaccattttttcccctacggtatcttttgagggtgggagcagattcaatgaactcgacttacatcacgtttctgtttagtgatccgaatatgaagcaatcattcttctctgattatctgagtctttccaacccttaacaattctatggcccctctctgatgtctcctcccacaactattaaatattcctccttcctctgacttagagaagatttcctgtatttaaggtccatttggtaggtgtggtcctagtaaggagcgttttgagtacagaaaatgcaacactccccaagcttgcttaagcaagacaggggttacctgggggtctatagagttattttccaggggacatgggtaggaaatgcccccgggaagcagggggcctggaaacaggaattgagatgttccagtcaggaaatacagccacctgtgctgaggccagctggtcttgttttctgacctctcgctacacatctgtattccttgtctccgtctgtttctgtctctgtctcttcctccttctctctctctctctcttttttgggtggggggatggggggatggaattttgctgtcttccaggctggaatgcaatggtgcaatctcagctcgctgcaacctctatctccctggttcaagtgattctcctgcctcagcctccggagtagctgggattacgggcatctgccaccacacccagctactttttatatttttaatagagacaagtttcaccatgttggccaggctcctctcaaactcctgacctcgggtgatctggctgcttcggcctcccaaagtgctgggattacaggcataagccaccatgcctggccatccctcttatcttaccctcttctgccttcccaagacccagtccagcctagaccctacttacctttacaactaataggcacagagacttgactgggccattctgtgctttacttccaaatccccaagaaaaggaatctaaatcatctaacctgtcctttgggttgatccttactgagccagggaagctgcctaatctatctgtctaatcaacagccacaaggagggaaggtgcagttctttttctctgactaataaaagttccttgagggccggaaccagtattcccacgtggcctaacacccagtaggtactctgtaaaattgattgattggttgattgattatataccatacaacaggcttgaaaactcctacagtgtgagcatagctttcaaattgtcacttgtcccttctaataatgaatgtcagatgatccaagctgaacagagtgttggattcgtttattttactttctgtagaccttctgggtgaagggcaggctcataaaacatgtgtataagatggaaaacttggggtacttgcagcgatgaaatgtaaagcataatttaacattacatatagcattgaggctcttggtaggatgtgatgggtgcccagctgctgtatgttttgatgtcgttggaattgcgggtcctgtaaggcagcagtccccagcatttttggcaccaggtaccggtttggtggaagataatttctccactgactgggtagggggtggatggcttcaggatgattcaagtgcattacatttattgtgcactttatttctattattattacattataatatataatgaaataattatataactcaccattatgtagaatcagtgggatccctgagcttctctgcctgcaactagatggtcccatctcggggtgatgggagacagtgacagatcatcaggcattagattctcataaggagcgcacaacctagatccctcacatgcgcagttcacaataggcttcgtgctcctatgagaatccaatgcagcggctgatctgacaggaggcagggctcaggcggtgatgcgggcgatggggaaagcctgtaaatacagaaacttcactcgcttgcttgcctgccgctcatctcctgtgtgcggcactcgtctgtacccagggggttgtggacccctgcttcaacgcactattttctctcccagacaagatattgagagaaggggaagaattgaatggtctttcttaatcatcaaaagggaccacacattcccaacctgattctgttctcttcatggtctctctgagctttgtagagaaggaaggaaaaggtacgagaagagaaataaggaaaggcaggggaggaagagggggcctcagaagcatcttcaaagggctggatttacaccccaccgcctgtcttggtgcccgggggctgggtgcattcaggctcccagatgagccacagcccttggcctcttgggtccacaccttcatgttagccaaccctgatgtctccatcacccctagataaatggaatcgggcatggaggcatctaatggctaggcagattaatcatatgcttgcttgctttttggaaaccccagaggaaatatctgcagatttaattctcagttaaaggtggaagtgtgggtttgaatcttctatcaggcattgccccttcctactcagcatatctttggaaaggtcaactctgggaaagattggagtgtcggcatcttctacctggtgctgtataaagacttctgacctttcaatggtcctaattccccctcttccttctctctgaatattcccctcctccaccttttttagcacgattatttattaaagttgcaaaggtcttgcattcccacacacacacacatatacacacacacacacacacaaatatatatatatgccacattttcaaataatgagttaccgtaaatggcacatatgagtactcctcaaaattgtcaaggttatcataaacaaagaaagtctgagaaatggttgcagctgagagtctaagaagacatgacaactaaatgtaagtgctatcctcgatgggatcctggactagaaaaaggacatgagataaaaatgaagaaaatctggataaaagatggactttagttaatgacaatgtgttaatatttgttcattccttgtaacaaatgtactctactaatgtaagatgttaatgataggggaaatggggcatgggactctatactgtcttctcgatttttctataaatctaaaactgtcctgaaaataaagtctattttaaaaatggaaaacaaaacaaaacaaagtggtacatgctacaacctcatttcagctggacaatcacaaagtatcaccttggacatgcagctgaaacggccagggtggaggtggggacccagtgagctagtcctcggtaacaaggaggtaaccaagcaatgagctcattacgcacaagcatttcagggcttgctttaaaagccagaaattaaccattgaagatgactccatatggtcggtttccttaacctgttaacttccagagtgaaaacatggcaaaaatgattcctgaaagcaaggaagtctaggatgagctggaaaagagggggcagtttccaccagagggctactttcttttctgagacatgagagatgctgcagtagatgctagagattttccagccagtgtcaggtaggtagctcggatgagttcaggtggcccgaggcatctgacctatccagtctaattttatgcattaaggatattgaagtgggtcacaaaagaagttccatttatttatttatttatttatttatttatttatttagatggagtctcactctgtcacccaagctggagtgccatggcatgatcttggctcactgcaacctccgcctcccaggttcaaacgtttctcatgcctcagcctctcgagtagctgggattacaggtgcccgccgccacgcccggctaatttttgtatttctagtagagacgggggtttcaccgtgttggccatgctggtcttgaacttctgacctcaggtgacctgcctgcctcgacctcccagagtgctgggattacaggcgtgagccacctcgccgggcctatttattgtttttgaatgttgcatttcaatacctcactgaccacaagaaatctacagctttttctctctggattccttcaacctctcccaaattgagcgcctgtcctggcccaatcgggcaggactgaggtgcctggtggtcacctccttagaagtctgcttctaactcccctctgtgtgtgtgtgtgcgcatgttttcctttctcattgacattccagcccttgaaacaaggtcttggctcctttcttattgcaggatttcgttttgggggagctggaacacctgtccactgatcgcctgccactccgcatctgggcctggctgacaggcttgtctgctttgactaatgatgtgattgatggacaaaataaggaagaacatacaaaaaaacatttctgtctggtctggtgtgtcagcaagccttcatcaagtggctgctgaaggtatattttgctgcatggctcattacacagtaatggcattcccaggcaaagctgtttcttttcatgacacaagacagcaggcagctttatgggcgttgggcccaccgagcccggaggaaggagaggcgcactaaagagcggtcatttccaaaagtgcctcaagttgcttttttgttgtcatgaatttaatatgaatcaacacaatatgaaatgggcatgagggatcttagtgactagtgattttttaagactgctgtctaaacagccatcaaggaagaaaggggagggtgaaaccacaacattttctttctccaaacctgttgcaaaaaggagtcatctgtcaattttattgcattaaaaaagtacacagaagcatatagtccaaacaaatgtcttctttcaggctaaacatgtgggaaatgccacatagctgatgccagaatcatctcactcagcaaactgagtattcataacccccattccaatggcctgctgcggatgggggtgacattcgtaagaattacaaatgctactctgttgcctctttgtgcatataataatgatctgaacatcagttctggctggaacaggagagaagcaaagaactgcttcattcagctaacaagatacctgtgggttataacccagtgctggaggatgaaaaggaatcacgattaaaaacaagaaatagagtaggtaaattcttggcctgattttttttctcctctttctttattagggtacagttgagagcaggaacgttcggtttggtcccagagttcctacttcatttttgcaaagtattttagctgtcctcgatattatttcttctttctttttttttgtggcaaattttctttgccaaggtattttattacacatactcctctcttttctttaacttgctggactgtctccaaagagaaatgcttaaaatgaagtttcattttacaaacactttttattctttcttgctagcctgatgagtctttagtggtgggttattgtgaataatatgtgattttaatgagttgtgattagacaaaactctcttcctataataaatactagataataaattagaaaatatatatgagatctttattcctattttaaaagggtgaaagacataaatgcaaaagcttgttatgataaatataaaagataatcttttaacgtgcatttaattgactgtgcttctaagaggcggtggtttgacttctgtgctgatgttaacattgcacagctccaaccaatgcaaactggcactgggatgacagccacctttccaccagggccattagtcgccaggccttcagggggcagggattttcatgtagggcagaggcatacaaatttagaaatgaacatgtgatcaaatccaaacagtcagatgacttcctatatatacaataatgagtataaaaaggaaaagaaggagggaggtgtattttgtgtttttttcattgaaccaaggcagaagtagttgtccaacagcttttgttaatttccaagatccatccatattgttcattacatttccatatcaaaataacaaactgtagagcaaaaggctcatggcattctgttgacttaaaagttaaagcagagggaagtgcccatcaatgcagtaagagagcaggtttagccagaatgagcacaggccagccaatgccaggaacttagccatttagaattgggaggcaggtgggtggtgccatggcagcgaccatttaattaggtacacttttctaggctaaccttggagcggaggcctggtgtcgggtggggggtgctgtgtacccccacttcctgcacttcaggtctgagaaccattagcaagtcctgttttttctccaaactcccaccttttgctgcctttgtggcctggcagaatgttttgctgccactttcttgagtgacaacttcaaagctaagcagtgagatgctttaacctacacatcccctcccactgcttggacccaaaggcttcctctgcaagtgagggcctcaaaggagacctggaacctttattcttgtcctgactttctgttttagaatcaggaccttttcaaaaccccaggagcagacagagggggtgtggcatggactctatgtgagggtctctcgcatgccaaggctgcaatctatccattctccagcgaggttgtttgtttcggagctagtagctgcaggaactattggggagcaacatcatttagcagcaaagatattctttctcagcaaattgcttgaagccaaggggaagaagcttccaggttggtgatgctaagcgcaagagtggaaggggaaggaagccctaacctggggttattttctttaatcttataggagccagccacccgtacacaggctgctctatatattacagcatacattttttctgttcctaatcaggtttgtgtatcttcctggattgattttctttcacaaaactcttaatatttttccagatgcctcctctcctaccttttgtccttcccaactgccattcactaaagaaagactctttggaaaatgttggcctggaagcatgtctattcctattctagtttctggatcctgtcaacaatttttacttgtatgattgtctcattatttttattattttaattgaagtggtggcattatgcaatttggtgaagaactctccaaatccacttggttctggtctccataattcaaaacaagttatttgatgggtgtgtgacttttaagattaacgttaagattgtttgtttaatttgtgggattgatttggtagatgttttcgtgttgaaagaaggctgattggttttggttgggaaatggaattctattgcgttcccagagagtctgccatccagagctgggcagcttcctggaaactgtctgccccaagcaaaagaaagtgctgtgttggctgcctgttgtctgaagtgcagagtccgggggactctgggagctgctaccagatacttgcccccacagtgcctttgaaacactctgcaaggcaagatgaccctgggggaggagcggtccccacctgaacccacaggttggaggcttcttcagggagaggttgacatgcacctttttaatgcatacacattaaaacacaggttgagtgatgtgtggatgcagggaaggccttcctagggaatgacttcagatggcttaatatgattctcttagcctggctgctacttcagttgctggctcctaatggggtcccccttcttcacacaggcgcaactgacattatctctaacctccgccccaacgattccctgtttatcccaaattgtggaaagccttagaacttaatcggcacccacatttgcacatcccagaagagtgggagccttaatgtcctatggggcaagactttgaacacttatttcaagttatttcttccacgtctgtggtcctccccgctccctgctgatggatgatcttgagaaacgccgttaagtggtttctcagatgacagtcttgcgagattaagcgatcggttgtgctccaagttgaccagctggaaaatgccctctcatgtggacttcacctccttcctcacctcaattccctttgctctcgcttctgcttcctaggttcgtaccctctggcactttggcagcacgtgagctatgtgggtgctctggggatgaccaaagactggatgccaaatggtatcagaatgactgggcttggcagttcctcatcagttattctgctggagctttcagggactattagaggctgaatgactccatgcccagcaggtactttcagaaggacttgaggatataagggaatgggtcagggaagtgtggtacaaaaaaaaaaaaatacttgtttgtttgtagctatgccaagatatttcaaacccaaagcctgcctggatcaaacacgtgactttgtctccatggtatgtcagatggcaggtgggccaagcctgaagaggccaagacctcctcctgctccagctgaacacatctgctctccaccttggaagccccattctcatggctgcagtctttgaactctgatgaggtgtgcgaaacaccccatcgacacatcatatcagatatcttttgaaataaaaatctcctagatcagtttcaactcattccaaatgtcatatgtatcctccagggtggaaatcaatcttccctccaccctcaaatgtttgaaatgcaatgtggattttgggtgaaaagctggcaaatgttgagttggggatttgagtcagggcttgattctgccagtgccatgcctaccagggcactggtctttctccatcccatttggggtgtccctaacttcccccctataaagcctgggctcctctgccaggcattgtccccgtctctcaaccgcctctctaaattccctttgtctttcaagggtcagctcaagccctgtcttctgcatcacactaaatctgatccttgcattccatcccagttaccccccaacacatatgatgtgagcggcacaacctagccctgccttgccatattcttcaactggttcatgtgtgtgaatccatctctctagcatgcatcattcttctgtgtgcccacatgagtgtcccttttattgctaggccctggaaacttggtaaatctttatggactgatttatagacattgggaaaaggaaagagatgttcccaatatttgttctccctcctccatcttatacagagtcccttgcctccctctttattcctgccacgtgtttacttgtggagatttatgcagactcacccctgacccaggggatggcagtatcagactcaccatcggaaggtttggttaatcacctgatatttctccaaaggcacttgacataaaacaaaacaaatcaaatgcacaaatcatgtcatatataaaacaaaaatgagcaccataaaaatggagaaaaaaatgtaagctacaatgcatactaactttaacctataaataagaccagggctattttctgatcctcttttgcaatgagagctattgcaaaatgcagaaagaaacttaaaataatagcaatttaaggcaaagtgtgtgttattaaaagtttgtgatgttgaagagccaaactcctattccagtattgagatttaatatgtacttcatacaaaaataaatcatgtaatattttcatggcaggcatagaattttatggcttttatgactatcatggaattgggattcatattttatagacagctctaataacatcaagaaaatgctctgggagaaatgggggcttagagaaagacgagtgatcactcaacagaagctggaatcaagcgtaattaaagcccaaaagtaaggatgcgtctccactccatgggttcgaggcagggcccaggcaggaagagtggggtgtgggaagatagtggctccatggagagtgatcttggcaaaataggactcccctggtgctgacttacttgatcctgcaaatgtccactacggaggtaggagggcaggcagaataacttactcaagacatgaatacattaggaaggatactctcacatttgatttcctggatatctaaccatcctcagcaggggaataggctccattttttgcagggggcagatgcaattgtggagggggaccctaggaccccctacctcactcacccatcatcccagcaggcttctgtttccttgcagcaggactgtctgagaaattaaggtagccaaaaataatctaacagcaaccaccagttgtcaggtgctttgctgagctttgcagggatggtctagatgaagtctcatagccattccatgaggtggagaactggacgtaccgctctgtcttccccacctgggcactagctccctgaatgctgtgctgattggtaagcacagtggaggacctatgtcctcgatgagctaagctttgacacatgattctagaactcctttcccctctgaggcacagattgcaaaataacttctagtcctggggtaggctgaccccttattccagctgcaggtagactctgactcctgtcccgtctcaccactcggcccaggcagaccccccagtgcagtcctgaggcaagtacagcagtggtccaaagtgacaccagagacctgtgccatggccaccccgcatctgtctacaaaggatgccacctttccatgattcctggaaaccttcctttccatatcctttagatgcacatttctcttttaagctcatgatgtgctgagcttgtcccaagtgggttctagacccaactcaatggctctgtgaccttgggcaggtcccctcatgcttcccggtcccagtcacctcccctgtgagaaggggatgaccttcaggctctttgtctttgggacattgttgtggacttcaagggttagccaaagtgaaagctctctgtaaattgcaatgtgcttcaggcatgaagcgtccacacataatgacttgaattaagtgttctttttatttctttttacaaatataaacccaggcgagcataagccaggcagggggtgcaaagccggagtatgcatttggaagccttcgcctggtgtttcagcctctccataccatttcggatgcaactcctctgcccaccgaatactgctgtgcattggcgaatggtattttgcagcaatatttctgctctgctctcagaaatatgcgagtcctgcctattacagcatctgtagagacacactagggaggaagcattggctccgaagggctgagagccaagcagtccccttccctaagctgggccctggcctgccttcccatgtggcactcttgtaaggcctgacctcctcataaccctggccggcaagctgtgatgaatgggaggtcatggtctcagcagaggcgctggacacaaaggacagcagtggccctcattccctgggaacacaaggatcacatatccccataagttgaattctaggagagatggagtcctggctgggcccgcggccaggggtgtggactcttctagaggctgcagccccagacctctacctcccccagatcctggctccttctaaatggaggaagagctttcaatggctgcctgggtggtgcagctctttaggatactggaaaacctctctttaaaggttcatggtcatttgcattcttattaaattgcttggataaaatattcagccacaaccccctccatttgactcttaacttgataagacataatttgcaattgattattgctcaaacattcctggtaccacattacgatctgctcatacatctcaccctctctctgccaatttagaatgaaggaaaaatggtttctctgacctttgacctgtctgaggtgggactgttaggtcattagggccattaggaatcaaaacaccccagtccatagccaacagagacagaaatggatgtgtgcagcaatcagctgagcttattttttttttcttttcttcctcttggtaagatacaggtatttttcagagttggaagacgtctcgaataaatgagcttcgtatatatatgcttttaatgtgatttgcctgtatttatttgggtgatcacaatttatgccaagtgaaaaggttaagagtcctggaaactgaattattccatttatttgcagacatgatacagtgcagggcagcagaagggctcatcctcatcttgccctgcccctgacctcacccctgacctggagatgggcatcgcggctctgcacggagagtcatcaccttcaggggctggctcaggagccaggcaagtcccccagggcaggcagcagtgtccatctgtcatgactgacctgaataagcttttattgagtagcttctgtgcaccctcttcttcctatcccagggaccattctccaggcctatacccctgtgaattccccttgaagggttggccaatgagtggcacccataatggctcatttcttcactgcatttcagtttgcaaacttatcttcccctggattatttctttgcacccacataagagccttcgaaaaatgcatgcaggatttagccctcactgcacaagggaacaggggcacagtaaaatgtcccaccttgttggggggtgaggtcttgggccacgattgatgggcaggaatacaggtctcccaggccctggcagggcacactgtgctttctccccaaccctcagcagggccatcccccaggggccctctagcagacagtttgcaggcttctgactccaaggaaaagctctcatggtgaaggaatagcttaatgggagcattggttggagacagagtttgaggctgtggactcctcatgcccccaccatcacacactcctcctgtgtgcttagccatgcttcagggccggagccaagcctcctgcttcctctttgtgcctgaccgtccctgggctgtgtcctcttggcttgccttctcatcactttcagattaccctggagtaattggatattggtaaccaattactgaatttttcacatcagcttcatcagtgactcagacaactgcaccacagtttctttcaatgaagagaagaattataataatttgcattaatgttctatgagacgtggaaagccaaggtgcttggcctgccgagtaggggagggtggaagctggaggctggaggcctggcccttgacgcaggggtgtcaccccccagcctccctgactacaccctaaccccaaagctgtggccctctctgcccctaccagagcactcacttatttgtccttccctccttcctgatgagagagggtgctgctgcctctgggtggagaacttggggaaggcttcctgaagtcactatgtaaaactgggccttggagacaaagaatgtggaactgcagctctgggggaagatattctcatctgttgtagaagaggatgcaatggaaggcggggcgtggtggctcatgcctggaatcccagcactttgggaggccgaggtgggcggagtttttgagctcaggagtttgaggccagcttgggtaacatggtgaaaccctgtctctactaaaaaaacaaaaatttgtctctacttaaaatataaaaattagctgggcatggtggcaggtgcctgtaattccagctactcaggaagctgaggcaggagaattgcttgcacttaggaggtagaggttgcagtgagccaagatcacgccactatactccagcctgggtgacagtgtgagaccctgaccaaaaaaaaaaaaaaggcaatggaaggaaagagtgggaaagctgaggatgtagagggagttgacctcgcagacctgggcatattatccccgggcccaccttggagggcactagcagacagtcctgcaagctcatggcttcctgtgtctgtgttggagggttctctggccgaggaagtatgggtgacccatgcccagggcagaccagaaatagcatgggggttaaacagccacgagcaaggatgacagttagtgaataaataccctggcttcttccctctccgtgaggcagctccaggggctgctcctcccagccactcagaggttgcccagcaggatcgggccccagtggcccatcctggccacctgctcctaaactcaccctttgttggatttcttctcttccctaacttgtctccctactttttcaacagtgcttcctgggatcctctcccaaatcaacgcattgcccccatatccttctcttaggatttgtttctggagaaacttgaaagaaggctgctttgcatgtcaagtgcaaggtgttccgggttggggtggtattgattgactggattgctgggaatttttcagccttgggaacggccttcccttggatggggcagaggccctgcaagcccaccttcccctgatcccacagactccgcctatctgctctccccaagcccccacgcagcccacacgtgctctgggtggtgggcagcctgatttatctggagtgtctgggctaaggaagggaggtgagcacttctcgctgggagggattttcagctcatttcacagataaaatcaatcagatctaaaccacattcattgtggccatgagaagggagtctacacagcaggggccaaatgggagatcctttcctcccttcccatctggctctgccttagcctgggggcagcaggagccccaggcctccaggctgtgggaggcactgttaccttccagcagtgctgctgcagagacactggtctctgctccagagtaattggcatggccctgacttgggaaacatggacaaaagacagggctgcagctagggcatggggaagaagccaggcaggtggaaaccttccatcagtccctccaacatggatttttttcattttctggatggtaagttagccgggaacaagaagaaagtgagggtataaccacacgagcataaatgtactaattccttttgctttcctccatgatactgaatggaagaaaggagtagcagaagttggatggctgcatggcagtgcctagaagctgccctgctgggctgtctgaggccttcggctgttgagtggtggggatttctctgtgttttccaattgtcctcattgaggaaaaatgttgggccatccagctcctttctagatggcttgaggtcagtcctgcagctcaggaatggcatgaacttggacccctgttaagacttgcatctccctgcctgatctctcagcattgtccacccatggaacttaaacatctggaacatgtcttttctctcctgtagttcagtgtccccaaacagtgcagcaactccaaccaagcaactcaggaggctgagagagcaggcaccccatttcctcctccagttggaggatgacagccttggtctcattccattttccaagctgcttgcatgtgggagggagaccactgcttctgtatgaacggttttctctatagtttctttatagacccagatgggctaggttggaaaggccagtatctcctgcaagtgtctcctgttctcatctagggaaacaactgtgctttgtaacttgcacgtgaggggccaggattagtgaccttgaaggcaacaggccagtgagtatgcagggagtgagctccagctgcctgtccagcgtccatgacctttcttctagtaccagtaccctggtttattctacagaaccatcgcttccccttccacttcatgtatttcatctggaccaccccaatcatggtcagatgacttaagctacaccaatcagaacatatgggtctttaaaggcaacaattgaaagggagaagtcatctcttttccagttgctacaaagattaaaatgcaagcccagtgctctggcagccatcttggcaccatgaggcaaaggtctgcctgagaatggagctgaggcagagggaaacagagcgaacaatggagagagacggacttgaataacattgtttgagatcagggctccagatctagtcttggactcatataatgtgagcttacaaattcttttttgcttacactagtttgatgttaagtattcttgtcatttgtaactggtctacgggcaaatacccaaggctcaaaggtagcccatcatatccccatccatccgtttcaatgaaatttattccattcaattcaattcaactaacatttattcagctccttttaagccctgttctagatgctgagaaaacaaatcagatttttatccttaaggagcttatagtcaagagcaggaagcagagacattagaaattgcctccaatctaaggaagcagatactccaaatgtgctcttaaaagagtgcatacaaatgtacatattaattaatacatgctaattagaagctgaacacagtatagtgcaggaacagagaggggtaggagattaattctgactaaagaaacctaagaaggctcaaaggaggaggcaggctttaatcttggctttgaagaatgagtaggactttgagaagagaagaatgcatgagtaagtgaattaataactgaatgcaacctaggtttaaattatctgtcacgtgcatgggtgccttgtgaagcattagtaatgaagaggctttgcgtataggttatgcctgctccgggcttccaatctagcgaagaaggtaattcctgctgattatttatttatgtatttatttacttttttttttttttttttgatatgaagttctgctcttgtcgcccagactggagtgcaatggcgctatctcagctcactgccaactctgcttcccagtttcaagcaattctcctgcctcagcctccagagtagctgggattacaggggcctgccaccacacctggctaatttttgtgttattagtagagatggggtttcactatgttagctaagctggttttgaactcctgacctcaggtgatccatccacctcggcttcccaaagtgctgggattagaggcataagccatcacacctggcccctgctgataatttataatggaaagtggatcgtgtggaagaacggcttccagctagcagcctaggaaaggcatccggggaagggaatgaagaggcgccactcattcagcgatgaagtgggtcatcctaagactagagaccagtcctggaaaatattcagaattggataaatgagagaaatgggaaatggatggctaccttgagctgggacctgactgtgagaagggaagtagtgtgtaaagggtctcagagaggcttgaatgttgggctaaggattgtgatgttgtgtgatgggtgaagggaagccactggagacagtgaccctgagcatgatgccagagtcttatctgggaagatttgtctgtgcaggggagaaggagaaatcgagtgaaggaaggctgaactcttgaatgcaagtaggagaaacccaagccggactggacattcagtatcagggaaagaagtgacattgctagatattccttgcctggggcctggctcaacactgcagcctttccttcaccaatggcagcccagatttctctgcacagtgggtgggaaatgcacctctcggtgcttctgctcacatatccttgtttcagctcaagagagaaagggattctccctgctgtcccagttttctatcattccggagaagagcactgacaggtttttcttaggtcttgtgtctacttgctgagcaaggagaggctaggatggagcattagtgattagcccagcttgggtcaagtgaccacctttagccaggacacagcaaccagggatgagggggtagtccttactggagcaaagactcctctctccctaaagtgacaaatctcccaggcctggctgctggggaggttcgtgtgagtcatgaatccctggttatttgtgtctgtttcctagagctgggcttattctaggagggactaagcgggtcctgaatgagatttatgggaggagagaagtagagggttagggaggggcagggaaggtggcagtgtgggtgagtgatgagcccttggaacctggtgtctctcgcaccttccacatgagccattcaaagcccgcgatgaagctgggcatctatgtctgctgcagagtctccaggtaccttgttcacaccggagggggctacagcttctgctatttgcctttgggcacctagcccggaacctacaattttaggaggggaatggaatactcttgttagtctgttcaatattttgtaatatgacttggatgttacgtattctattaacaaaggtcataaaggaaaaatcacatttaacgggctacctccttatctcatatgaggccattctccgtggagaaatggtgctgttttaaacagtaggagccctggaggaaaagctcacccatttgggtcctagggctaacattcttacagcacaccagccggaattatcccctccgtctgaggtaccagcaattaggacagcacccccagccaggccccgaaacctggctgagagacacatcagattaatacatcaccaggtatgaaagcgcagttagaatttgactgaggcacttccagcctgagaaagggaacgatttatcaatgcaaacttaataacatctatttgaatctaactaaaaatcaatatttcattaccaaattgttagtgagaatgaagaaaaattgcggaagtcgggcagtttggtgctagggaagcgtcaggagttcaatgtgaagacggaatgattcatgaggccgcaccggagtaagggtgaacgaggacgagtgcggaaaacttggaggggccccctcgctcatgaccttggccgtgacggggggagcacgagaaaatgagagtgactgtcagttcccttcagggatggagccctccataaatcacagggagaggagaagagcaggctggggtggaggtacacgaatgggggtggcaatttaactctttggaccctgacatctaagtggcgcttcccacgatgggaagaacgaaccgaatgggtaaaatccaagggttgggggaagtggtgcctcgtggtgagtttctgcaaaacagagaagagaagaaagagctagcctgtgaaaagttgtcatccactagattcagctacactcaagaccagctcaccttccgttcccatcagaaaagtggaaatgacagcctatgtcttgtctgacatgaacataaatcagcgatttggaaggtctgttctaggtgagggtttggtgaagattttcaccctgaatatattgatccgaaaatgctgtgtagtgccatgactagtggcattcattccccatacgaatgaagtccttgcattccttcccaaatccgagatgcggattaaacctcagggcttgctgttgctttgattattgatctcgttccatcctgtgtttggtttcactgctctggccatgttttgctggcaagacattcaaagaatatgcatttgtcctttagcaaggaatggaggagaatcacataagatttgactcttatatgtaatgctccataaattaaattcgggcctctgctcactttattcattgaagagttatgcatagggacccagcagcatgtcagatgaacacctcagtgcctatctgcgtttgagaaatcatgggaaaggaggtgtagttggccctattggcctaaatctcaggcactaatttcagtagaattccttttaaaaagtgagggttagcctctcagtcccaaaagaaaatggggtgtattttgacagaagatggtaatgcactgttttactcaaacttttttttttttaaatcaaaactggtctgcatgggatccaaggatttaaagatgtgtggggggcattaagtaagctggcattgccctggaaatatgataggaaaggcaagaaaagtcttccacatccgctctttatgggaataaaacatgctctgggtcacactgtgagaaagggtggtggggtgtgtggagctcccagaattgaatttctcagcagctcaggtttcctctactcactgctaggagtgacccatgctaggctacatttcccccttgagagcggtccccaagatcgggaacctgtttaatcttgtgagtgtggagttccttgtgacccatcttaccctaccactgggacacatatggccttatgcctcacaggagcaaagctcttacatcccacacgcagtggtcgtaaaacattcggcaaacactgtttcaatgctaggaaccctactgaactcttccatgaacttcctcatttacaactctgtgagataggttctattactgttatctccactgtacagaaaggaactaggagttaaggaaatcaggtgacctgacccagcacagacaggaagtggcagagcaggatttgaggcccagttcaccctcttggcccattgccctcccgcccccacttgtgaaactgccatgaggtccaggccaggtggttttggctgtgacaatgtcctggttgtcttgaacctctttaatgggatgcactgttgtcctgagtcagtgtcccattgttgtgtgagccagcagcccatgtggtgccacacaactgaactgctgttgagtgtccctgctcatctagttcactatctgccatggagccagcacaacgattgttgctgagagccttcaggccactgcttgtacactggccccaaatacacacttgaatgacaaggagaggagtccaaaaaagagagtcgagttgccataggctctgccaagccacttctgagtacatctcaacaactgaacggctgcccacctctgtggcacgagcaatccctcagtttatggcatttgcccaagcgcgttctgcagaaatcaatgtccgtgacgtgcttcccaggatttacatgctgggaggatttcccctgtggggtttaagggccagtatctcaggggttggcccatcagtgtttgaaaatatgagctggagcggactctggaaatcaagacaagtgtacctctgagaatattatttataaaagcctttttccaaactttagagtcttggtgcattttttttcaagatggcatcaattgcctggctaggaatatgcaatagagtccctgtagaaatgacttccattcatcctcagggacctggctgtggggagcctttagggaaagcaatagggatcccctattgctaaggtatggcatccaatgactggcaccaagggtggtgaccattgctgagaattggctgtagaattcccatttacattgatatcttgacttgctagctggacagataactatttcaaagtagaaaaaagcagacaacacagtaagcatcgaatgaaataatttcagctcaaatgtcctgacgtgcacaggaggccaacactaacaggcagaaacttttaaccggcatgggagggcaacaccacacactagcacagctcagaatcagcagctgcaacccatcaactcgtggctgagcatgctgcgggaagggtttttgggaaacttgaccttgtccaagcttatcaacacctgtctgtcaatgatactctcttgcactcatcactcaccaagggccattttgagctaagtgccttcggttgcaatacacagaaatgtttgggaaagtttggatgtgttgggtatcactgaagaaaagaatatttgaacccaggtctcccagatcagtgtccataggctgctatatccacacggaagaaagtatgtttctcatgtctcatgtatgcattgtgaaatgctgcagatagcaaacaaaaataagtaatagatgcaaaatgcttaccccaggtcctggcacaaaataagtgattgatatgcaacagcaataataattgcttcattattctctaactactgcctctattcctactagtacttctcctgtaattactacttcaagttaagtccaggtttgcttcagggatccttatctaaattcactgtggccttccacaaccaaaaaggctgcgcttaaatgctacacttcatgatttgtagcatttcactctagatggctctcttggttttaagaatgaggggcattccaagagggaggactctgcagctgtaaaaaagagtggtgtctatctccaagaaatatacttctgtgaaacaaagcaagatagagaacaggaggtgctgtatgctcttatttatttaagacaagggggatgccaatatacattgtatattaaataaataaagttaaaagtcataggtgtggttataaggggaagaaagggaaagagtacaagggacagagagagaagctagacttgtctgaatagacctggtttgagtaattaatttaggaacccaatagatattttatataatgatcaaacacaattaattcaaaattttaaaaaatctattcctacaaaccaagggcaaaaaaaaaaaaaaaaaaaaaaaaagaaagaaagaaaccaaaggaaactaactacatgttgatttgattatgtaacctacagagataatttgctttaggtgaattcaaaatagcttccctaatgggttatatcctaagggcaaaaaggagctgccaacatggttttcagtatcatattattagtaatcatattggtattgtcattctgaaattctctttctttcacacatgtatgtagtaggaagaagcaatgaagtaattatgctaatgccgctagaaaagtatttgcataagaaaagaaatacaaatggaaaatcaaaattaaaacctaagtttgaatgaaaaatgtcagtttgaatttgtgatgtattttcttttgggaaaggagagttatttcctgtctgttcactgaaaagacctgaaaatgatgaccaacccaggagtgctgggaatctctacagccagattgtggtctctaaataccactttcaccaaaacgaattggggctccttagagaaatgtctgatcccagattcagggcaaatcctgcagaacacgttgtcagataagaaagcaagaaggctctccaggatgcctgacatggtgtcaaaaaaaagtaagagccaacatgaggcttctgttggccagagacatggaaatttacatggtcagagagtttcactgtgaatattaaccacaatggctgaaatcacattaaacgtgttaaaatccacttgctcgcagtaatacttaaaaaatcaaacaaacaccttattagtcacctttggaggccacatcatccattcattattgtgaaaactggcaaaggcaaataaaaaagaatccagcatttaacttgtgtttgctgtgagaactatacctcaggctagccaaatagttgagaacagaaattactctttatagaagtatggcagctcaaaaaggaagaaatgatgatagattgtttaattcccaaaaataatggatttaggttatagttattaatggctattgacacgacaagaaaagagttagttgggcatcatgtacttccaagcctgaatcatacccagcttctagatctaagtatcagtttacaggaaataaatacaggggacagagaaacatgttaaaggacacaatagagatgaaatcagcaaaatccagaatgaagaaatttctgtaggacaaatgacatgtttttttcaaaaaataaaaatatagaggaaagacagggagaaaaaatctaagattaaaaattgaataaaccaactgtaagccaacaagtaataaaatttttcctgttgtctattaagttgttttaaatttgactgtatatttgatgatactctgctctcattagataggatgtaatgttgtttttttagaagtacaaactgacatatttattgatgaaagagtgtaatagttggggtttgtttgtcacaatactttgctttggtggtggagagttggtgcaattgatgaaacaagacaggccatgatgatagataattgttagagctgggcagtatgtaaatgagagttcattatgttattctctttattgggtgtgtgttggaattttccataataaacgttaaataaacgaaagagtgtgatatgtgatataagcctttttttcctcacacatctattgcatacacatattttgtctggcaccgtgctaagatagcagatagaaagtttgctatgatgcagtcttgtcctctagggactcgtggaagttggagagacaaggctgtggtccagagagcacagggtttgctggaaccctgcaggagggcactgctgctgtgctggaaacctgctttctggtgtgatctgacaccagcagcagccaattctctagagcccactgcctcctgaggactcagcagagccacagaatgaaggaggtggaattatctctattgagatgggaacacgcactagtattactggccacctcaccgagggtactcctggccaggtaaaaatacaccttgtagaatcagatataatgcattggtgtagagaccatgtgctcactggcacacatgacaactttaataaagtccttcaattatctcacaactaactgagcattgctgctccctgatactacagggagtcaggtgggtcgaccaacacctgctgatgtaatgcaatcccttcatgggcgctcatgataattctagtttggggaagtgtgccttgaaatggaagggggaaaaatcactgcatcgggtaactaggagggctattgtgtatcccaggggatgctgtaatccatttaaggcatttttagttcttagccctagtgtgtgcctatagcctcatgctctgtggtttaggatgagctgaatggctgctcttagaggttgctctgctcctgcctaagtctccacacccaggagaaacccacaactcacctcaaccacgaagacaaatccatatacagtggcagcagctcaaagaagcaagtgacaacacagcctgtctagcactaccctgtgcagtatctgttgtgtgccaacccatcagctttgccaaagatgtctctttgtggcacagggagtctaaggtggccattttctccatttctgcttgctatgagatgcagctaaagagttcatcagtgatcaataaagagccacatgcttatgtttgctccttggatctcaaggacacttttttttttctttaaacctcacctgcttttagaggagtccctgctgggagggaaagaacaaaatactcttaaagtagaagagcttctgtagaggtccctggtgtctccttgctccctgaggacagccacagctctggcatctctacatagttttctttgatggagcctgcactcctgcaacaaaagggcctcaggtgagctctccatctgtggggcttaccccacgctctctaagggcttgggggcataaatcaagcaagtggcgattacaatagtgggagacccagctctgcctctgggcaaagtcctgcccttggggatgcagaacactgagctgttctccataaagtacagcttggaatcatggagcaggtcaagaaaatgcacacatttgaagaaaaagaacagaggacagaaggtagaggtgggctgttttccaggaaccagccagaactgttgaggggagaatgggctcatccaaggtattcatgtgcatgtatgagtcctccaagagcacagacaagtgcctgatctctcactgtgccacagccatgacagcacagagactttgacacacacttctgagcctgaagttactcctcccttctgcacatcctcttccaaattccccttcccatcttcccctctttaacatgaaagctacccttgactgtgagatagcatgaaagtttgggcaatttcttgaacacacatgaagagtccttgatgattcaagttccatttggtccccatacacaggtctttccacagacaaacgagatttcttggggatttcatatgatacagttgttccttctccatgcaagttgtagtaagtcttctggcttcttcttactttttaccaccatgttcattgtcaaggtgtcacaggtcatcactaaccgttttaatgtcttctatggacacacaactactggcattaataggccaaaaaaagcgctgcagtgaacagtctctctaagtattgtgtagaccacattggttattctgtatattggctatacagaaaaatgtgtgtgtaaatgagtatgtgcaaagtagacctatttcatgttcatagaagagtctgagaagtaaggtttttatgtgggatttcaacactttcatctcctgccttaaaagctatatggtttgatcatctgtgtggatgtgatacagaatgcacccaaaaccctttgactaaaagcttcagagtgtagctgtcttaatttggtttttaaaatacagagatatgggagcctctgcgatatcaaattccagaattatttgcaaatttcagaatatgcttgaattttgccttcttaagtatatgtagttaggaaacaatatgaaaaatccacttaatcatgatgagattaaaggatttttaaaagctgagttgcagacacatttacattccccgataatttcttaattttctttcaaatcacctttcatcttcataaaatgaactgtaaaaatccttctgaattccataatgtgccaagaaaaatggggaaaaattaaggaggcccctaccttttaatcattctgttcataaagtgctttaactgcacgccaggaaaaaaatggaggctctggtgtctgaggtattctgtgccataaactcccataatagaaacagatggtgaaactgccttggaagtgaagaaactagtgtacacgcagctcaccctaacatatgaagagattcagggctgacacatgaaggaatgcatttggcgtggtgccagcagtacactctaattcagccgtgagtgttcaagcttgagatgggagacccacaatttcaggatctggaatgccggcagctccaggatttagaatgccgtggaaggttcttgggctctttccatcctgccatggaggacggtgttctcagtgtttcaggtgaccgtgagttccaacagagagctcttcctggcttttataaatggttcataaaaacaatagtggagaaatgccaggtttgctggagcttcctttaactaagttaggatttgctttttacctagagctgccgccagtggatgctgaaagaagagaaaatgtgcaggacaaagagacatcagtgaaaatgatattagacggaaagggaaggaccctggtgccagccccacctgtgaccctagttgattggatggcacgtgcaggcaaaggagcctctcttggatatcgtgttttcccaagaaaattgaacacatttccatgttgtatcccaatggcattaatacatgcatttttttttctatgtgctgtattagttagggtgggttaaattctgttacacagaccccaaaacgtagcgatgcaaacacaatggaagtttacgtgtcctgtatacagcagtctagggtgtgcaaagtggtggggaggtctctgtccaccttgaggctccccatccagcggggtcttttcacctccagcacccagcaggtgggagggagagagcacagtggaggcccactgctgccttcagagctgattcccagagttctacattccccttcgactcataatccactggtcacaaggacttgagtgccacagccttgcacgtagacagagaagttttgatggacagctgcattgtggcacgtggatgtattaactagatgttctgtcgtcccaggagggtcttgcatgttctccccacctattcaagcctgtctgaaattgatgctctcttttcccttccaggaaatgtggtgtcctctgatcctccttccttcctgagaactggggtccttgcagatccgccaagtccagaggtgcccagtggccctgcatttccttccaccagagtcagctgaattcagatcaaaacttagaagaacgttcctccctccacgggactcagccctgaggctggggtggagctggggaccagacccagtggaaccctcattgtttatcctctctcatctctgatctcaggcactcaggtcccaaccgttctcttcctagcctctttacttctatggaaatcactcagacattgagagacccctgttgtgagaggttgggagactcaagctctacaagcacaagccaatctcagctgaggctgagcctgaactattccttgtgtccctgcaacaattctccttctcagcactggcaaatgatgtttgtttcccaaaagcaaggaacatgtgaggagcagagtgatatttccacttaggaccaaaccttccaataggtacaacttccctcatgccattagccctccttgatccagagaggagacagccaggcaactttagtctctgcagggcctagtcctaaggtgattgtgtaggatttgggagaggaaggggagagctgaccactctgatgttaccctgagatggctcctgtgccgtgactgactgtgctgtgaccaggagactcagcttacctggagtggggctgtagggacacatgagccaatttcctaccttaggctggccagaggctggtttgggagcaggactaggttttgaggggtgctaaagcttaaacagtttgagaggccctctaagaataagagtatacaattatgagtgcaaaactgctagagttcctccagggcctgtgcctggtgggtggggcaaggggttccccagagacttgagcttcataaggactctgctgtgtatggaagtagggggtagggggagaacaggcatcgtgtctaggttgtgtgcaccagccagttagtgctggtagcatgaggcagttgaggacatctggggctgagggtctttctgagagcagctgatggaggaaagggaggcccttgcagaagaaaagtctttgctgctcagggatgggactgaaaggctgattgtacagattcctgaccccttcagagctgattcagcacttctgcatcacctgaagaaagagaaagagcgctggtgccccttctgcttctccagcctgctttttctgactgaccattccctaccctggtcaccccttcacctgtggccacagacctctctccagtaggacttatagctggtttcccattggccatgtggcttccatgagagcatgcattctcaagagtaagcccaacactgtctttccaggaggctctcctcaccctcactccccaccccacttcctgtacctggaatggtgtggggaacagtacctggaatggtgtatggaagaagcctgattagatgcatggaaggatgaaaagatggaaatctttagcaggttcctattgaatggaaggatcagacactgcctcacagctgcttctgtatttatctttcttcttggcaagtcttgctttgaatagactgcaagccccctgtaagctggctgtgtgtccattgcattattgttaatctctcacagcctggtagagggctgagtgctcagaaggatctgagcagggctggtggtgcagctgactccatcagtggctgctgttgacatttctctagcatgggaagacagtggaccctcggtgtgcaagggaaagatgggctgcctcaggcatacaggaagctgctctggttgcaggtatactcctagaagactgtgggggtgtggcagccatctctgcaggcaccaggcaggggtagctaggggtcagcctcccatctgtttctgctcttcttatcctcctgttcatagccagctcccttgagagccttattcaggctccatgaggctcagttagattctagggaagcttcttttttcccattgcagaagggtcagcagtggaggacaagaggccaagtagcctcagaatattggggctccaggaccccaaagggatgtttcccaactgattctctaggcccataaacagatgggttccctgagggccctgctctgtgtctgggggaaggaaacacccaggactggttgaattccagtgagaacgatgctgccgttgatttgtggtttgacagtcaaaaataatccaagcattgctttgcatgtgatttatacaagtgtcttaattggcatcttgattatatgattgcgtgaagggctgttttcaagaaggtgtatctctaaatagaaaaaagaagaaatatacagctgtgaagtgtgcgtgaagccccccaggatctatgccttccctttgcttttatgcactgacaccacattttccagtttctgcccctagactggacctttagtgggaaacatttccccaaattgcataaatttttcctgcagacatggagcttggtttgcagtttttctctggatctgctgcatttttctctgttacacaaacttagtgatgtggtctctcctagtctgattacagctaattattttagaaatatattttaaaggcaagtgatcttaactttatggctaatccaatggagaagatctaagaaagacctgaaaatcataaaatgttccagaacattatattttatgcagtccagaatgtgacacatggggtctttaataattcactgcttgttaacattaaacaactgttaacatgctcaaataattagttatgcttgcttgacatgtttgcatctttaataattgatgcatttatcttaattactaacagtattatggtcgtaatatgcatcttttttctatcttagaattttaacaaaaactgactttttgccaaaaatgattatgctctaagttttaattactcattgtaattaaattgcaagctgcagtattttactaaaatatctttcacaaaaatatttaatggaaaagaggtgatttgttgtttatgtagccaagttagtaaatatttcataagtttgatattaccctttcagagtggatataaaatagcattactttcaagatatgagtcaatttaaaagtcttctgtagcttaagatttttctaccatttctactcaaaatgtcattcccccgccaatccaccaccactatagaaatctggtaccactctttgtgtggaagagaaaggtttctttaaccagccaggcaagtaggaacttgaacctctgtttcaggaggtggtgttgattggaaaccaatagaaaagcgatgtccacactttccctccatttcctttctccagccctgtttatgtaagctagtccagaagaccagcattggggtgactgtttgattaaaatgcaccttaataaggacgcagacatatgtcccattgtttaagctttgtccaggtgctcatgcatgactggaagcttactattgattgagaaagacctactgcttttgagaacattagcgctgtaaaagcctgggagattatgagaagcaaccacttcatttactgacagggaaactgaggcttgcaggcctttggcccaagctcacacagagtgacccaggtagataagaacttagatactcagatgacatgtccagatctctgtcttatacacctacaggcctttcctttagcccgttgggctatctttgaggattcatcagggttcctgcactaggcaaaatctatcagcacaactggtcagttccacagaaggcagggttatgggccaagaccttgccatttcttaactttctaggccccttactgggattccattcatctgggctctattttcactgttctggggctcacctaggctggaagcatcaagaagtacacgtggttgagatctgggtgatgccccaatgtgttttgctggttaattagttactgctgtaagtcatcagaggttttcaagatgcaaatcaagcaattatggggctatttggaaatgacaagcagaccaagagtaaatctcagccccagcagaatgaggcccggcttactaaggacccggaactcaacccactccagtctgcatcctgaacacacaaaactcttttcttcgtcatcaaaactgcctgacttcttggggacctaagagaggggcagggccactggatctgtagcatggggaggtgtctcagttcttcaccatcaatttcaaaagcacccagatcaattaagatgcctttagtcatagcaatgagcacaaaatctcaacttatattgtcttgaaaaatgtggaaatttactattccacaaaactaggtatccagagcagtggggaggagtgaggtagaacgcctccattcacagcacagtaatctcatcaaggacacgggttctttccatctccccagtctaccaccctcaagatctgcttcatcacaagccttggcccccttgggtcacacaatggctgcagctgttcagctaccatgttcagacacaatatccagaggaaaaaggtggcactgtctgtctctgtgctttccatgtaggaatgagaaaatctttcccagaggccacagcagattttcacctatgtctttttggctagttctgggttggacacttcctcctgaaccagtcattagcaagtggaatgaaatgaccaggattggcttaaatttgtcatccccagatagccttggcatagtggagtcaaccactgtatccaatatgctcccttatgtcaatcaatcaccccttactcagcagtcattctcagctgggtatgttcttcatgctgggtacagtgtaaggcactccaaagtagataaaataaatagacacaggctctgccctaagaaagtttttgataatagggaaatgagacatagaaacaaaccactaaatggaaacctactgcaattgtttagaagaacagctaacaaacgctgggctcagtacaattcatcagggattttctaaacatcttctatgtgcatagatatagcttaggtgttattgaggagacaaaagaacataaaaatgcattcttcctgttaaagagcttagttaaggtgtccagatatgcataccagggactttctctgtctttcccttactccagacagaagtacagatggctcttggcgagcttaaaggagtatttatggggagtaatttcagagcttctgctgggcctttgcataggtaagagagtggccattaagatgtgtctgtcagttgagaaagcttttcactctaagtaatagagaaccagattaactgtgtctaaaacaccgaagacatttattgtcacaaagtctccaggttgttactcagctcatcagtgcaatcaaggtttcagaatttttctctttcccttctctcacctttggattgctagactttcatctgtcttttttatttttttgttttgttttttccctcatggtggcaaaatgaccattgcagccccaagcatcaaatctgtattcaaagcagccagtgctctgcgggcacactttctctttgttcctgttctttttatcaggaagcaatataacttccttaaaagtccaccaataaacctcccttatatcttgctggtcagaacttggcctcctgggcattgctgtgtgcaagggagactggaagactacaatgagacgtggaaaaggagtggggtgtgaggaaggcagtggatttgccaatccatcatgcctatcacaggaggcgtggctcagtcatatgtctttctttcataacaggcaggaggaccaaaggggcacaaaatgagaacagaaagttggaggaggggacccactgtgccattcaagctcttgtgagtcattagtttcatcgtaagagtttcttttcaaattgtggagcagttgggcaaatatttctttcccctattatattttagatggcactgtctaggatagttgttggctttggttaggagtgtgtgtgtgtgtgtgtgtatgagtcaacccattgggcaatttgaagaatcaaaacaaaacaaaccgacaaacagcctcaacccctggtactagagacatctgtgcatggatggccttggtgtatctaaccctgtggttccctttccatctccatccctctacttgttgcaaacgtagggaaaaccctgggacactgagaaacaggtggggcatgggtgatttgcggggagaggggcattctttcacaagatgtggtagagatagctgagccttgtgcaagagtaagactgattttctgatcacataaaatgcaaagactcagcattagaaagtctgatgcaaccttccctaccaggataaagtctaaacaccttaacctagcactaaaaaccctccaagatttggaccctgcagcttccagcctcaccagtctgccaacagagacagtcttcatctccacatcgccctcaccctgggttcctgtgtgtcttcacatctccctgtttttattcatgccccttcccgtgtccagagctcccttctgctccccgtccctatgctaagacagttcatctctccacaccctgctggacctttcctatccctaagcacagacctcagggcctgggcctcctggagccacccactcagcagagtcacagcagcctggggccaggacttcccttccaatgactttgccacagtttggctgcacagaaaggtctgtttcctgcatgccatgtctgtaagagtcttgactgtggcccaggtgcaagagacagacatccttttgttgtgatgagaggagtgattcctagccttgccacttcttagctgtgtgagcttgggtgaattattgaacctctctgtgcctatattttgtcatctataaaatgggcataacaatagcattttacacgtgtaggaagcccaatatggccctcttcaggctctcccattctgtaaattactcaagggttgcttccacaggacagggatggcttagaaagtcccagcgtcacttccacctgtctctcctttctgcttctgatgagggcacttcacagctggcctaggcttgcttccactgcaggcagggaagacagaaggcaaggaggccttctttgcccagctctctgggcagagccttgctgatgctccatgctaggtatccactttactgctccccttgttctgagagctgcctggttctgctcaacacaacagaagggctggtctggaaaggcctcctgccttagactcccactggcccagagccaggtctttcttctgagccagtgtcagacccccaggccctaatcacccttgccctgcctgtttctcagtgtcccaggctcttccctacatttgtgataagtagagggatggagatggaaaggaaccgtgggatgagataaacctatccgcgcaaagatctctccagcactaggaaatgaggctgttggttggtttattgtcttttaatttgattcttctaattgcccaatgggttgaatgcccaaagggcattcctctttggagacttctgtgtcctttctgtcctgtaggctaacttggtccaccccgacaggctgcctcgacatcagttcttaggatgaagatgttacaggggcaatcaatgggctctctgcccaatgcacagagaggcttttgagaaaggaaaagttttattgtgagtctactggcaaggagacaggaggaaacactcactatgtctctggagctgagggctgggttggattttataaacatagaataatgaggtgtgatctgattagatcttgcaatgaggtgatgacaggcagcatgatctgattggatcctacaatgcggtgatgccagtgtttgatctgattggatactggatcctactattcatgtctgcttctcaattcagttcgcactcctcagtcccagtgcttaggttacccatggtggttgcacagttggctcatctgggcatgctcaagttatgtgaccttccacttggggtccatggccactgaacaacagctcataactttgttacaagaaagttgagccagattggcctcgtgtggttccaaagatagtgggatctgtttctcccgctataaaatgagtaaatggcatgtagtcagtggttttgaaaaattatgttaatcactgcaaacctttacaaagcatttccaggcaattccatgatggaagctggattctctgggtcaagtagggcaggcatgggcaggggaggagacgtttccctccccagcctctctgccaaccgcccactggagatttgcttgggaagaaggttctcggaagcaggttctgcaccaggatgtgtgtgcagggacatcctgaggaagggcatccagggaactggtaagggagggggaaaaacatggaagagaaggaaaccactcaagggcgagagtttctgaagtccctcaaagggtagccacagcctgatcctgctgggggactttgcagtgttagttacaactcagtgtcatacacttctaggtaagggaccgcagctttcaagcctagattaggaatgacatccaaaccccatgggggaggtgagaatattcctcagcattttatactcaaagaggacagagcaaggcttgcagccttctgagggtggtctgcccaagatgagctgctggtgctggctcctggaagagaagacccactcaagtcatgggtcacacaggaaatgatgaaattgagtccccaaggaaatccgggcagagcaatgacatcatgtctctgtggggaaggtgcctgaaaccgagcagatgagggccctggggcagggggcacagggagaggtgggctgcctctccctggacgtccacttgtctcctttgccaagcacctaatcccaaggatctgcagagcaatggagggggcagccgagaggaagggcggacagcagagtgagaatagaggctgtgcccctgcagagcacttttccacggatgtgtttttctttcagactttatggttaatttatttatctgaccactcgggaagggaagaaaagtaccattttatgagcgcaggacaaaataaaaaacaatagcacatttaggtgccttaatttttctgttcctagagatttatttcattgtattatatttgacagcagtcaacaaacagcaaataggcagccaagtgcagttctcttagccgtaatggtttgtattctctgcacaaggcagagttttttttttttttttaccgcatacatcatttggaacttgatacattgatcccaaaaagtaatatacattacttttgttctcctgacataaaccagcaaaacaaatccagtggacggagtggggtggggccagacataagggtgtgactccctttgggaggggattgctgtgagtttagcacgtgtgtggggactacccgagaatgtcagggctggtgaggcgcaagcatgtgattaggtgagggcgttgtgtgagtgttcaactgtgcagtgtgatggggttcaggattgcttgtctgtgggtctagtgggaagcaaagtgatgttaacttttctagtagatatgagaatatgcagcctgggaagtctttgtgttcgggtgcatccaagcaccctgaatctgttaaagcttacatcaatgtcgaacaagtgttctggctttaagggagtggtcataatttgggcaacccttatgccccaagattgtcagcctggaagtcacatgggggccacatctccattcatattttaattcctcctgttccatgctctgggattccagtccctaccttagaactcctttggttatctcagcaagttcctagggtgctagtatttctcatgggtttctgcacccacaagtccttactgctgtcgttgcttggatccatgtggatgatgtcttctctgcacattgactcctctggcatctcagagactactcaccttccacagctaatgctgggctggccaccaggaagggaatgggtcctttcactaatgacctccaatgcagctgaaaccaggctgcaacttctggcaagacttgactgaggggatgacagcatcaggaaatgaagtcacagcatggcaagtagatgcggctgtctccatagcccacaggctcaggcccattctgccctaagaggctggttggtgcagcctgccaacttcctgccagtgtgtctccctgtgccaggaactggcttcttttgtcctgacagtggcaaatccacatgcatgactccatttttttggagtccaggttcagtttgcaaagaggccagagaagaaaactgttcttgggctaaggccagttgctgcttcttgacgccctctcttatgacggttgacagtgggtgagtccagttccttcaaaggaaagtcttcctcctcccacctccagcttccttgaattatggccacagaggatcaatggcatgagagtgacagagactacttgggagactgcattgtttgatctgtccccccgacaataataacacataacacgctagtcttcgtcctgcctggtcagggaggaaagctttgaccatctgctccctgcaattggagtgcccccagctatgatccaccagcaatcgcttatccctgccactcagccatttatcagtactgtcctgtctaaatcccaaaatacaaaagctgtactccccctagaggaacaaaaccttctgagattcggtgctggattgatcccaaataccaatttacttcccctgaacgaacctcgagctctgcttgcccaacaatggtgagttctgctttctccaaaacactgggagaggatgtgctttccattcacaccctgcagggccattcaggtggatttaccccaaaggaaagcagatggagtcttcttcataggcattttcaaatgtcttcctattctgagagagaaaacttatggaactattgagggaacagttattccaatgctttttttgttcccagggaaaactgaaacaaaccttgtaagtcttatcctgggaaccatgtgatgtgtcaattggcttaggcaggaatttaactttcagatggtatagagcagccacagtttggctggtactgtgcctggcctttgaggctacagagataaccgggaagggtcccagcccacagggtacgagtgccaaggagagcacgggtgaggtaggaggtgggatttgactttggaggcagggctcaggcactggaccaaattgatgactaagggctggggcagaagcagctttccataagacacacccactaatgtgccatgtcagtttaccattgccatggcaacacctggaagtttccacccttttccacagcaatgacccaatgacctagaagttacctccattttcctagaaatttctgcataggtcaccccttaatttgcacgtaattaaaagtaggtataaatatgagtgcagaactgcctctgagctgctgctctgggcacactgcctgtggggtagccctgcttcacatggagaagtacctctgctgctgctgtatactgcagcttcaataaaagttgctaagaccacctgctagcccttgaattcttttctaggtgaagccaagaaccctcctgggctaagctccagtgtggaggcttgcctgccttcattacaagcttatcctcagagaccccacagtgagtggcccctgacaaatgccagaaccaggatcccagagagtgacaaggaaagggggaggcagagatagaccctggctggggaggtagctgtttgtcatgaatcttatttattgctctctactttaggaaaaagaggtacagaacaagctgtctgtgtacgtcaaagaacttaaagggccaacaagtacctctgagtccagttgggagtgaaaagaacccaaacactgatcccacttcttttttttttttttttttttgagacagagttttgctcttgtcgcccaggctggagtgcagtggtgtgatctcggctcactgcaacatccgcctcccaagttcaagcgattctcctgcctcagcctcctgagtagctgggattacaggtgcccgccaccatgcccagttaatttttttgtatttttagaaaagacagggtttcaccatgttgggcaggctggtctcgaattcctgacctcaggtgatccacgtgccttgggctcccaaagtgctgggattacaggcatgagccaccacacctggcccccacttctttttaaacgagcatgtggaaatgaccagaacttcctttattctctgcaggtaccactagaggtcagctgtggagggttacagagcagctccaccacttcatcccacacagaccctgccaaccacggcagaatggagaggagccccctgaacctccacctagccgtgtgatctgctcagggttccgtgttttgggggaggggaaagaggccgcctctggggacactccacactctgttctttctgcctcacagggtctcagaagcttccgaatgatgccccaccacttgcaagaggggcaggtggtatggaaaggtctcttcacaggcacccctctgcatgtgcggccctcagccctgcggcaggacaccatgctgtccatgtcagtgaaaagaaaggggggccagtccacgctgtgttggaacacaggccccacacatgtgggcatgtgtttctgggaaccacatggtgtcaggcccatgctagccactatcaccacccaatctctgcctggtgccctggggcttcatttggaaggagaaagaacctgggctgtcagagccgagacaagccaagctatagggtaaggctgtgggccccagataagccaagctacagggcaaggctgtgggcccctggattcccacagaggagccaaacagccaagagacgagactttatttacaagtctctctgtcccaaacagcccaggcaaaatgtcacgggtgagttgaggagccgggaagtcactgctctgccctgagtttcttcaggtacttgctgggccagggacagacctggaatggggctcatggtgtgatcattttatgagttgtggacacacaaagagatctccatcaagtcaccttgggtcacctgggatattcacagaagtcccacaccaggctccataactgtactgggaccccaagtctccccctgcattcttctttgagaagtagaccctcagagggaaagcccaacagggtaggaagacccaggttcttccactgtcatgagtgcccacagccttaggtctctgggccataagaacatacgctacctggggcttctagcccatatcagagaggggactctgagtcccaaagtcagaggtttccgggaagaaaacattgtctgtcttttcaatagagacccagaagtctctgccctgggagaccccaggtgacagtctttcagaacccctgtgggtctggcattcatgaaacctgagacactgaagatgtaactttaatggtctccactaattcatggtctgcctttatgcacttaagaagagaactcttccttcttatgacacctccatttattcagaattagcatgtaaagtcctaaattaggcattccgcactcaggttctgacagagccattactttttatgctgagagagttgagttaattttaaattattgaggcccagcacctgagtgaagtgagcgtcttcacagagattgggcatctgtaggccctgctaacacagagacacaactggaatgaaacccatttctcctctgctgaccagatgcatatacacaatggacccagagagaggtctggcattgccattaattttgccagaatggattttgggcagaaccaggcttgggtctgcctctcaggaagcagaaggccgacttacaggtgcaatctgcttgcccgacccagttatggagtggaagggccttgccttccccagcaccagtctctaacagccacagtgctaggcgctgagactgtgtttccaaggagtccttagtggcagagacacttggggtgaatgagagtcacattatagttggacaggagaaaggaaccagagcctgttgatcctattctcagtgcatagcctcctccctggcacctgcctcccagcagggcagcagagagctgtccatggacttcagaaagttgcttctggaatctcccgaggcctcctcctcattgtatgcggccagcatcctttatagggtggtcactgcaggatacctgctgttctgtaaaatgtctgtgaccttccccaccacccagggtgcccccagtccccctcgttagattgagttaagatgagccttgcatctattggacagaaatcggcaacagaattggccagctggaacacgggcagctgcctccccagctgccaaggctgccgccaggatatgaggagcttgagcctccagccagcagatcccagagatgcctgtcttcagtgcagtcctcattcctggaggaccctaactccactggggcatctgtattccaggagaacccctctcctctcccagtagcccaagttttttccagagaattcctactctcgttggcccctcccacttcctcacaccacactgccaaaacagcagcactcccaattgtctgcctgtgttgtctccagggtcatagaaggtgggatgtgggaccattctaatcagatgctaaacagtttgaaatttgcaaataatcacactgttgacattaattgctatttttactatctgcaaaaatttgacccattgtccaagtaaacctaacagatatgtggattatatcagttggggctgccaaggtgacactgtcaagttgatttcatgtcattttaatgtcttctgtaggccctatactctctcaaccagaggtcctctggctagagtggaatggtcagagcttagaagcttgttctgcccatagaggcagttgttagcctcagacaaccggggacttccaggtgagaggactggaattgttgtctgtcctggaggctgggagagtccaaagtggggacagtgtggacagcagagccatgctctaggatcagcattctgcagactgcctggagcagcgcggagcctcctaggagcttaacttgatcaactttcagcctgagctggaactaaatccaatagagattggcttggagcaagagacagctggctgcctgggccctctggacagcggccccctgagagcggcaaatcagaaacaggcgacaggccaagcccagcctcaccctggtgtggaacacaaagcagacccactgcgcattgtggaagactcctgtgggtttctgctcctgaccttgagaacaggaagaacccaaggttcccactgcacctatcccaagaagtccatggtctggctcaggccagaagccaaaggcctcctggccaccctatgctgcaaaacactcacattcatctactgggaaacgggcagcatggcaccgaggagtgtcgtgttcagttttaaaatgccacaaataacagatttatagatttttctaaatacattattttagcttgacagcattaatcattcatgcttccttctttcatttttctacctgcaatggattattgaaacagaaaataacaacgagaaaggctagcagcagtatcaaaatgtcaagtttgtacttacagttgtatgggcccagacagggtcaagagccccaattatttgtgtatgtacacagtggtatgacacgaaaggttatgtcacctgcagctattttcctgcagatttaaataggactgatattcagctgtacagtgagctgctgacatggaacagaaaattgtaaaatactgcaaactctggtgtcagaacctaaaatatgaattgggtgattgtaaggtatagctgtgggcagtgccgcatgtcgtggtgcaaatccgctcaattactttgggttattcttggcctgcactttttcatttaaacataaggcaagagtgaaatcacaggactgggctgagggtaaaatgtcaggtctgtctactttgcaagatgccttctagagaccaagagtgcacacaccaaccagcctggacagagagaacaatatgcatgtgaatctacaagggtgacctggggcacccctcggctggtgaagttggatagatgatgggacaataaaggcctattatgcatattctgtaattttttgttttcttttagaatgtagccattatatggaaagacctgcaggaacgatttgccatttggtcaataaatgaaacgttgattttttaaaaaattaattttattaaaaaaaaaaaggcccggtgtggtggctcacgcctgtaatcccaacaatttgggaggctgaggtaggtggatctcctgaggtcaggagttcgagactagcctggttaacatggtgaaactttgtctctactaaaaatacaaaaattagtttggcatggtggcacgcacctttaatcccagctactcaggaggctgaggcaggagaatcacttgaacccaggaggtggaggttgcagtgagctgaaatcacaccagtgctctccagccttggcaacagagagagagagactgtctcaaaatcataataaattttttttaaagatggaatctcactatgatgcccagcttggtctcgaactcctggcctcaagcagtcttcccgccttggcctcccaaactgctgagattgcaggcatgagccattgtgcctggccatttttttttctgtcagtgaattccaaccctatgtcttcctcacaaggattctgtgagtatctgtggtcaatagacttatggtatcatacatgggaataaagccctagaaggtactacaatatcctttcgcagacagctcaatatctcatttgatcaccaccgccacccagtgagatatgttttagacaagacaaacaaaacaaaaataggataaacacagatatagataggacatggttgagaaaagaatcaaatgttaaatgccactcagctatcaattagcagagagggctccaccccacatgcagatttcagtgccccaggtgctgtggataacttgtgagagcaccccttctgtccctgcttcaaagggcagtgggtctgcataggctaactggtcctaggaatggcacagactcttgttcctggctttcctaccactggggctttgggaagcaactagcttgttttaggtcaagattttacggtttagcttaccagtagggaggataactcaaaaggcagtgatttccaattctaacatattttgtagtgccacaaaaatgccccctctagaccaacagagatagagagaagttgacttttggacctcagcctgcctagtagctctttatcccgatgccatcctatctctccatgcatggcacccctgttctcaacttcccatgtgttgggtgagccactctcctccagtgcttgagaacaccgctcacatctttgctagttctgtctcaacagtcttaaatggctttcctccccgcctctactttttcctttccaactatcaaatccttgctctctttttcctggctctgctcaagacctcacctccttcaggaatcttatcaggcaattcctcctgaattacttaggatgaatacagaaatcaaagtgaattgccgtggacctcagcagaagagagcacttatatcaggatgtgaaggatgcacaggtttctctaggaaacaaagaaaaaaagatattcctgggcttcaaagctggatgaagtgaatagataagaaggtatgttatatccacacaagaaatgaaggactgatacacgttataaaatggatggatcttgaaaacaagcatgttaagtgaaaaaaaaaagcaagttgcaaaagaacaagctaggtccatatattgtattaccctatttacacaaaatgtccaggcaaattcatacagacaaaaagtagattagtagttgccaggggttgaggggagaggagaatggggattgactgctaatgagtctgaattttctttttgaggtgatggaaatattctgaaattagttgtgattgttgcaaaactctgtgaatatactaaaaatcaccgcattgtagagttttaaaaggcacattttatggcatgtgaattatagctaaaaaatgatgggaacgggaaccagggacaagatgttcccaagagcatttcctctttttttctcatctgtttccttctctcttctgagcagcttgttggcttgctttgctccccaatccaaagtaaagaaaatggcctcccataactcccaaacttccattcctttgcacaagagactaatcagaatgagtcaggaatctcttagtcctgattccaggtttccaggagaaaagctaattggtccaaattgggtcaagtttctactcctggaccattctactgcagttaggcaatctggcttcttaatataattataggaagtaaggggaagaggtgcatccagaaaaggggtagaggaaggataggctatccactatatttagactatccaccgctgatattgatcttccaattacaattaaggtgttaaaacctgttatatagacatagatagacatgaacacatggataattctcttaactcttctgctaccctttagcacactttcctacatgctacttcttgaccctatctttctgtgacttttttttttgctatagatagtttcaaatatattaaattttaccctacgcaagggccactgtctttcttttgtctctatctctgcagcattagatgcatccctggagacttacactagagttcagcatggggagtgaggttccggtcggagatggttccagattgtatacaagcttatacaactttggaggatgtctttaagaatacattacatatacaaaattagaattggaagtaaatatttacttaggatgagaaaagaaatcgccaaaaatatacatttgaaacagctaacaagtatcacaaatatctcaggaaaaaaaaacatattttattaatcaatttttaaaattaattaacattctgacacatctcgatggtatatttttttcctaccgttttttcggcctgcattctctttgatcaacaattttataatgtcattttctatagtgggactgaaaagatccttcctctagcatgcataaaacatgcaaattcacactcagatgaatttgctgagtgacgtactgctacagatttgtgccttacaaacatatgaattctcatacattctgtttctcttattcctcatcaaaaaggaaaaggaagtatggtatgtttataattgtatgttttatgttaaatatattccttatgggagatgatttccattttgactatgcatcaataataacctattctacattaataattttacatgtctaatgactggaagaatttccatagactagcttctggtttcatacactgcaaaccattttaattctctacaaccctttcgaggtgccactggatacatgcatatgtctatagagactctggccttgcggtttcatggcttgcatgggggtagattgatatagaaggcaaatcatttctgcaagccatcaatatggcaagcatacaactacacacagaattgactacaaatacattaatgcatccctccaaactcaaaatgaacatatccacattcaacctgtctttacccagatcccaaaagtgtccatagcctctctaactccaactgacactagaagacttatggtggagaggaagtttgagtgggaagagacagtgttctcaacaaattgtagctaaaacctttgggatcttccaaagtacaggaccacattcctaaggtttagggcttaggaaggcacccatgcaggcaaaaggccatgaagatcaagctgtatcagtgtcaaggtaaaatgacttctttttatcagtgtaaatgttatgggatattagagaagggagagatgggtgcatttgctggatggattacaatggggtacatcttttcattttcttcttaaatgatattaagagctggggttcaaaatctaatagtcttagcccaatctcttgaagcacagtgttccaaataatggaagaggggatccatgtctcttgggtctccccataactccatgtctaccacctagtaggacctagcagatagatctctgcacagagatctgatagatgggaaatggatgagggctgcagctcttgctgtgaggatcaaacaaggtaatggatatggaagtgttttacaaatagaaaatttctgtagcaaaatatgtctaacaaaagagttcagtttggttgagatgctccctataccattgattgaggataatcgttagtatttttggaagacatcttccccacccaacaaatcaatttgaaagaggcacaccacttttaagaaagactaaagtctcttgccatcttctgttgtcttctgtcatcaggagattgtgaagaatgggtgggaaaaattcttaaaccatagtccaggttttatataacaccagtatttttagacatgtgcctgctatgaactgaagtgtattttgaaaacttaataaaaagcagatattaacccacaaatgtttcattttaaagtgagatgaatcttcttccctgccccatcaccaaccctctgctattctaagtctcttattctagccaggatttttatttgtttaaggtgacttagcaaggtatctatattgaagtaatgcatcagccaaatgggagaactgctttatcagatactgtgcaagtgaccaaagactcttcacagagaagcttaaataaaaaagagaatattcttattggattatataagttatataaatggaaactccagagttagaggctcaggcacagctgggttcagagacacatgtgatatcgctgggacctggtctctctcccactcagctctgctccgtctggtgccaaggtggttgccaagagctccagatctccatcttcttggttttgagtacatgggaaaacaagagaacttcgtcctcaaaagccacagcaaagttatcattgtgactctgagctctgataaggtcgtggacccatccctgaacctatcgctggggacttcaaagtgtgatgatgtcccattggtcaggactgagacatgagtctgccatggtgggaaaaggattgccagtcccaatctgaaaacacagatggagaatgggagaaaggcggtcctccaaaacacagatgctgggcaggatgtccaccagccaaccaccaacccagggctgaccccactccaagccagctttgaaacaattgttctatgacttagaaccaggactcggttctagcacactcactaaaaaaaaaaaaaggtctctgaatcatcccctatggtggtcaactggcaagagaaaggaatcacttcaacaaaggtttatcttaaccaatctacccaagcaaaggtgacagcaccaagtccccacatccattgtgtgtgtgtgtgtgtgtgtgtgtgtgtgtatgtgtgtagatatacagaatgtactttttcatagatggctgttaattacgattcttcaccaaggtggtataaacagatctctgccaatagaaacttttaattagatttattaattccagaatgtagttgaaatgtggtgaatattgattgtaatggcctctgttttaaatataattaattcacgatctgcataattgctcattacctgtatcttaattatggggcataaaacattgtttatcactaacatagtcctaatggggagaggagctcactctgataacttaggattcttggtatttttgttgaagagagcaatgagacatttcattttctttagagggagagagaaaaaaaatagaaagctgtgtctccaatgacaaccagtatgcacagacaacctgataaacacagggcatttatgattcttttatgactacattttctgacaagataaagtaaatactcttttgtgggactttacaactgcacaaggctaaagctactgtccaagaaaactgaaaaatttgagtataaatatactagtgtgtttaaggctggctcatgggcaatgaggatatcctagcagcttgacaattttcatataataccatgaagaatttcatggtttttcttcatcttactgctagtaccagcacaatacatcttttctagaaaaaaaaattatacaaatctatggcactttctgttttttcccatataccataaatcctaaagatagttcatgtgcctattaccgttagcatttttttttaagtccgagcaacaaaacctgaaatatgccacatatacaaaaaaaatcaggttgccaggaaatctgagttaggtgagattttagtggtttttgattctgtcaggtttttttgggggggaatttcttttacaaagactgtggtctgtggacatccatctgtgcctctttgtgagctcagcacttttccagtgggaaagagttgtgtacctgtttataggagcttgcaaatgtcatctatggtaactgacttcatttggttatagaaacaaagcaagattagcgagaagaagacacggtacttttgggccaccttttcctaatgctgcttagccctgtaggggaagctggggaaggtaaccagtaattttagatcatcttctcaaagtagggaactctttacaacagaatttctcacaagccctcatcattgacaatgcatttttgttcatattttttaatgcctgcatacatgtcacagaatactactacatgtccttaatcctaaaaccagttggctgccagtcacctgaacttgatgatgtagtcactgtaataatccaccaaataatgcatgacagtgagctatttactgaggacagtaagtggattggttttatctaaatgtacaaatctgtattaggtcccaagaagctctgaaaattgaaacaaaaactgaagaaaaaatggacagtcgggaaaagggagaaacatgttttgctgcactaaaagccagaaaaagaagccattgcatatttttagcaaaatgcttaaatttcatccatgtacatttcctctgtcttcagttaagtgtgagcgaccggttaatagtatctaggtttctgacaaaaaaagcaacaaaataggagctaattctggataaaggaaaacactatgttcaaagcaggtgctacttccctcatactgatcatcaaggaagaagcctgtaatttctctgaatagaaaatctctctttgtctagcccccagtaaatacatgctgacaaatattcacatgctgtctgaaaggtgcccagaaggtgcacgttttctgtctgggtccccagtgagcgaggagctccatgcctctggaaatagggctgttccctccgaaatgggaactcagtctggccagacccctaacattgtgaattactctgctgagctaccatgatagtgcactatggacgggctggtttaaacaaccaacatttattttctcacagttctggaggcctgaagtccaagatccaagtgtcagatgtgggcagagttggtttattctgaggcctctcagctgggcttgcagacggccaccttcttgccctgccttcaccctctgtacctgttggtgtcctaatcttctcttcttataaggacattgacaaatcagaataggacccaccctaacgacctcatcttaactgaattacctctttaaagatgcaaatacagtgacattctgagatactgggggttaagacatcaacatatgaattttggggggagggcacacatcagcccatcacaaatagtaacatgaaaaacgtaagcagaggtatggaaaactgctctgtcaattataaactattagataaatacaaaagaacgtccccacattccctcccagtgcccacactaaagggtgcattttgagcaatggttctcaatcgtgtgagttgttgtggtggtggggggggaagttttttaggggacacttggcaacatttggggacatttttggcatttctggttgtcacaggtggagggggttgctactggcacctagtgggttgaggccagaaatgctggtgctaaacaagccaccatgcacaggactgctctctgcaacaaaaattaccccatcgcagatgtcaatagtgccaatgctgaaaaaccccaatctagaaggatctgccccctttcctttccttttaaccttcttcttcttctttttaaatcagtgctctcactttcatggaataacctgcttcttgaaggcagaagagaatggcgtctgaaaaggaaaagggagcaaagcctcttccaggaggctgctcccaggagccgcagagcctgctagcggagctcctgtgtgacctgcaagccaccaccatgcccaggctgccttagtgcttctccaagatcatttctctgaagttagcgaatgctccacttttccctccaccagagttatgattgctttactcttcagttttctggaaagctcctctcagtgtccaaaaagctaataatgaaatggatgcctgtgaccaggggttacctccatgaaggccttggacagctggggaaataattctgctccctgcatccaaccacacaagcattaggcctgcctcatttcccctccccccttccatttcatcctctgttacatctaaatttagccctctccccagtgacccagggaaagatcaaagctctctttgcattcctgcaatctggagaggagggagcagaacaagtcctgagagtaaatggggcaggaaatggtagaagcagagaggggggaggcacacagggatctccaggggctggccgaccccagggatatccctggagaccagaaggcccagggaattgaaggggaggtcttgctcctccatgttctaggtctctggaagtgtcaggggggtgaatacctccttccagcagacagggctctactcagcccacatggtgagatcactggctgggccccttggctcaagcctcccacctcagggtcccttcaccccacttccccactcagcagattccctggggcctcccttccagtcctgatgagggaggagaaaccatttgtcttctgactagcagaaacagagcctctgtctcaggctgggttccctgggacgggctcaggtgttgagtagcaggcaggtttttggggagaaccccctgtgaggaatggaggaaggcaacaggggcagagggaaaagctgacagcagcgcctcttgagtgaggcctcggttggtccctggggcactctggggttgggtggggccttcagagctgttccaaatggaggcaagggggctgggcctttgtaccctatgagttcatcccagagagaggtgagccatgtgccctgttgcaagctggggcatccacagggggtcatctgggcagagcacctcactattgatactagcctctttgaccaatgcaatggagagttttaaactcagacaggtgctatccgttggccctcctctggccatctccccagataacaagtaagcatcagagggaaaatgcccgtttatggtttgactttcactgagaaattcactttataatcatatctttgagaagcaaaggttgcactgggaaggggccagggagggctgagttggggcaggccttccccgggcctcacacggatgggagactgcaggcctggagtgcaggcttggagggtgggagaccactgtggggcaagttgggcaggaatggaatggccacaaacctccccagacttgagtcaaatcgctcttttgtgaattttgtggttcaaataagtgttttctgttttcgttgttttttttttgagacggagtctctcactgttgcccaggctggagtgcagcggtgcgatctcagctcactacaagctccacctcccggttcacgccattctcctgcctcagcctcctgaatagctgggactacaggtgcccgccaccacgcccagctaattttctgtatttttagtagagacggggtttcaccatgttagccagaacggtctggatctcctgacctcatgatctgcccacctcgggctcccgaagtgctgggattacaggcatgagccacagcacccagctctgttttcctttttgtattttgagacaaggtcttgctctgtcacccaggctggagtgcagtgcgatcacggctcactacagcggtgacctcccaggctcaagcaatccccccttctcagactctccagtagctgggactacaggcataggtgggactacaacaccacactcagctaatttttaatttctattttttgtagggatgggggtctcactctgtttcccagcctggtctcaaacttttgggttcaagtgctcctcctgccttggcctcctgaagcgctgggatgacaggtgtgagccactgcacctggcccaaatagacattttaatgcaagtcatcgtgaagtggaataaagatagttaacaactatggttaagaggcaatgtgtgcttatcaaatgccgggccctgctgtgagcagtttctgtgtgtgacactcatttattctctctgtatcctataaggtagatatgactgttaatgtcttggtaccttaacttcccacctataaaattggcccaagcaacttgttggagcgacttaaccaagtaagcagtggagctgggctttggcagaggctgcctgttgttggctcctgcagattgggccactgggcggccctccctcccatgctgagaacaggctgaaggaggtcttttgactatgaccctgggattcaaattttcaacatccaagagtagggacaggaaccaatgtcctgttttgtaaaccaggaaacaagcttagggagtgtctcacaattactactggtacagaggccagatgccaggggctttttacagaaaatcatgctgccccatgctgggcactaacattcataggtcccttggacatctttgaatgaatgataaaaatgcaagtttctgttgctgtaaaatattgttcagtaatagtatattatgtattcatatcatagaattccaaagtgggagagggccttagaaaatattggtttcttctctatccttgcagagtgagaaactgaggcacagagaggagaagtcacttgcctaaagccacacggcagctaattacagagccaagattaggtttctggatttctgcctcttagtcacagtcctattcgggaagcaaactgttttggaggatggggaaagaggaggagattacttggctatcagtgaaattgatcaacagagtcaacatttaattaaaaaatatatcaaaacctttcttgataatgatcgacctgttacactggcacaattaaagtggtgattttattcactgagttactgccaactcctatgattttttttttgtaatacccttgtgataattcaattggaaatatgtggtaagatgcagaaatataatgccttttcttaggataactcatgccacagccaaccagggagttgatctgatgggtccattgcagaactgaggtctccttggtgccatcctatctccaatggctctagagggacacatcagggaccttagacagggcccatatttgaactggtgaaacgcatccccatgtgttcaacagcactgaggctgctgcacgttagaggtaattaggaataggcgctttttaagatttaaacgataacttttaaaaattaaattttcacttaaaatttcatgagacagaaggacagctactatgatataaatgcttgcatctcctctaaattcatatgttaaaattctaatccccagtgtggtagttgtaggaggtgacgcttttgaggggggtgattaggtcatgaaggtacagccccaatgaatgggatgagtgccctcacaagaggccccagagagctgccttgcccctttccccatatgaggacacagccaggaggtgccatctttgaatcagaaagcaggcccctgcagacaccaaatctgcctgtgcgtttatgttggacttcccagcctccaggactgtgaacaataaatttctgttgtttataaggcacctgacttacggtgttttgtaatagcagcctaaaaggactaagatgacaacacccccactccgccaacttcctcatcccactctgagaatcttccaaggatggacagcctacagctctccaggcagacaagctcacagaactactggtggtggctgcttctattctgatgagcaaaggcctaaagccatgtggatcttgcactttgaaagtgaaatcatgagcccttaatcactgaaaaacataattgattcccatttctctagttaggtgtcctggtacactaatgcctcaacacagtttgttggggggtggatgagaaagaattccatgatcaattaaatttggaaaatgctacatacaatattgccttcttggactcacatactaaaagctctgggatgttctgagtcaatgaatcaatttaatttttggttcatcattttccaatttatctgaccgcagaacgctgtcttcatgcatacctatgaaaaacgtgaagaacccattttcaaaaactcctaattgggcagaactagactgaaactgattattaatcaaaggaggcttaggcaatagaatgaacaatctgccaggggtcaaaagacccggattctggtctagactctttctttaattagctgtgtgactttggggaaatcacgttcttctgggccttggtttccttgcctataaaacaagagactgaaattagatcattccaaaggccccttacaggggcgatatacaatgatttttctgatttgtgaagactcatctgctggtaggctgtctactctctccttacctatcacagctcctgttggcacctgcagggcctgcagggtggcctggaatctgctccaggccgggggaagtgcattataatccttgaggacattcggataggattgttgtgtgttcctggcccaccataggctggtggctgtgccagtcagtctctctctctctctcagaactcttccctctgtgcagaatttcatggtaagtattatgggatgacgcaggagacctggaccctctaccctctgcccctaggattgtgagtgtcgaaggggaaataagccaggtccacacacagatgcaagtgatcacacgcagcagtgggtgtcgacaggccaggtgcttagcgagatcttagaggaagcttcctcctcaaggtctgggtcattgtagagacctcatggggcatggaggacttcacaaagccagaaagatttgttgaattcaggggttcaggggcctggatagaaatgaggatggtctcagtaatgctaggacaaaacaataccaagtatggttagcggctggtgagtctctctgcatgagcataagtaggcagaaggagtgggaaatcaggtggggccgggggctttagacagaagacagcagcctgtgaatgccaatgcaatcaggctctagggtcacacaggcagtgggtatccattcttcaggaaaaaagaaaactacaaaatactaaacataatactagaaatagaataattcaaacaaatatgataataaagtaaaagtaagctctttctgcctcttccagaagatcaaccaataagacaagttcccatagaggtgatttaatacactgtcatgtgcaatgtttaacatcagtaataataaatcgtaaagggggctaatgctttacatggtggagcatagaaagaggagtgagaggcttagatgaggaagggagatggaacctctgccctgtgaaagaccgcaaggggtagctgggcactcctgcgggagctttcctttcattctcataaaatgagaaacagtgagagtaaacaactgttacggtaaatacttaaacaatgattaaaagacaaaggctgctgacatcagtcttagtagagatgctactacatatgagttctaccgtcagagggcctagagccactctttggaggcacctgcttatttctcctgcctgtgtgcttccacttaggagtctagacaaccatgctcacagggtctgtctgcaggtcactggattgagcaaggactctcaaaatcaggaaagacttccttagacaccctctcttgggttctttctccttcttccctgtgttccaggttttgtgctcaaatctccagtgttcattcccagtgtcctccttccccgctatgcactgtctgctaaaggccttcaggagtgtctcatagtggtcatggtcactgttccactcacctggtgataagtagaaacctccggccaaagtctctgggcacaaaccccaaataccatcctgggctttctgttagaatgccaggtggatagagtgtgtgtgtgtgtgtgtatctgcaacaatgcctttgcttccaagtgacaggagctctaactggtaagaacaacaaaggggatgtattggctcatgtagtgggaaacccacttgtagagaggactttagggtcactgcaatgcttttctttctgcctctctattctggctgctaggacgtcagcttcattcaatggccgcttcctctctttgagagaaagatggaagccagcaaatcagctggagtatgttttcttccccaggaaggttgagattgtgagagagagagagagagagtgtgcttctgttttagaagagtgagaaagatccttttacagaagctccaggaaaaacctcttttcatatctcattggcctgaaatggaacccaaagtcattcctgaaccaatcactgtggctaagactagggggctgggcttcttttcttgtcttgccaatcagcacctaccaccaggtgctggggaattggtcaattcccagtacacatttagtacaaaagaaggagaggaaactctgcaggggaaaagaaaggattttcagtaaaagtttaaaatgggtgctggaaagtcaatcaggagctgtcccaggacaggagtttgaccctatgaagactactgcccaatcattcatcatttctgaaactcttcttatacatacaagcccttaactgggcccttgtgtatgtgcctagatcagttacgatgcttctggctgcaagtaacacaaaatcctgactccatctgtcttaaataaccagagaacgtggaatctcacattcggagtaaggacgtctaccggagacagcccaatgagctgctcagtagtcaacaatggcccaggttgttcccgtctctcttctctcttgtcctcaccatctgtttcatcctaagtcttctttcttttgtattttcgaggtgactgttgcatctctagacatgacaatccagaataacaaggagaaaccatctcttgtgatttttcccttggagagaggacattttccccaaagcacctgggctgaaatcctatctccaccactcagtggcaggtggcctcaagcagcatcaaagggataataatagtccttgaatccttatgaatatcagtggagtgatcccgctgaagtgctcaacaccagccctggtacactgttgttctcagaaacgaggagcttgacttgcctggtgtgtcctgctagttgaaggtgtttccatgctctggcatggattgtctccgagtatcccagtgttcagtacgcctctttcaggtgtctacagccaaagtcaaggtcagaaaatgaaagctttgggggcttctctcccttttgttgagccctttgatcaatctcaccctccacagttcctctacttattaaccctagggtggccactttgctctaatcatcatgtttgctgaaaggccccaatctgcagttccctgtctgaaaaaaaaaaaagaaaagaaaaaggaaggaaggaagaaagaaagaaagaaagaaagaaagaaagaagaaagaaggaaggaaggaaggaaggaaggaaagaaagagagagagaaagaaagaaagaaagaaagaaagaaagaaagaaagaaagaaagaaagaaagaaagaaaaaaaaaaaaaagacaggctaacaatatatgtgtcgggacctatttttagtgctttacaaatcagatcttccctcccggcctcctcctgtccctcaggactttcagatttactacttaaatatttataaactgttacaattatttattaaaggtttatgttgttattatatttagtgtggaatatgcatttcgtcctccaaaaataacaggactttccattaaacgacatctgttaatgatgcagtaaattgactcttaaagcaatagagaaagttctcttctcctttgacaaccctaagtacccttatttaaaagtagaggccctacctcactggaaaatacattacttctgactccccaaatgttactctatgcagatttaggaaatttgtagtgcttacacagagaaattttaccctcagctatcaccatctagtcaaaagcaacagatgccttcgtagttggtagcccttcctttcctccaaggcttctgttggtgcataaatgtgcacacacatgtgtgcatgtgtatgtctttgtgtgcatatgtgtgcacacacgtatgtgtaagagaagcccttgtctcagctcagatttatttgttcattcattcagtttaatccactctgtgttaggtgtcaaacttaaggaaatggataagaaacactgccctgagagattcacaggactaacagaagagcaaaaaataagtaataaaatatcaatggtacataaagaattattaagcagtgtagatgtacatgtgcaatgccatggaaacaaagaagcactaattttgtagagggatttttttttgatgtacatgtagctctatgtgtaatagcaaggcttaatttgagaagaattatctggcttttttcttggaatgggacttgccttccatcactaggttgctaacccatccatctgccagtgttacccagaccatggtctagcctggtggttctcacccaggggaggttttccttctagagacatctggcaatctctggaaccattttaggtgatgagagggtgctaccggcatttagtgggtagaggctagaaatacagctaagcacccagcaatggccaggacaacccacacaccaaagagttctctggccccaaatatcaggagtgtccaagttgaggttgagaaccactgtcttgctcaaaagggtcctgtgggggtgggagtcattctgaacaaggccagtgaaattggcctgagtttcttggaggagagctgagatttgacctggagagacagttaagggtcttaaaatgaccactgccccttcctcttgacttggtgatttaccatccagaaatctgcctacgaaaaattggtcagaatggctgataccgaattatgcacagagatgctccaagctacaagagaaacaggaacaaaaataataaagttaaaaacaacctaaatggccaacactataggttggctcaataaattaggatatatttttaagattttaaagatgtctgcaagtaactttaatgacatatacaatgcatgtaattttaaattcagtgaaaaggaatgtcccttccccaatctctctttttgtctcacacacacagaaaaaaggatggagagaaataaacctatgagttaatacctgttagtagatgttgggattagagatactatttgtttttaattttactttaatttttcggtattctctagattctcaaaaatcaacagaaacaattttcttagttgttttcattttttaaagattattttagactgggcacggtggctcacgcctgtaatcccagcactttgggaggccgaggtggttagatcacttgaggtcaggagtttgagactagcctggccatcatggcaaaaccgcgtgtctactaaaaatataaaaattagctgggcatggtggcaggcacctgtaatcccaactactcgggaggctgaggcaggagaaccacttgaacccaggaggcagaggttgcagtgagccaagatagtgccactgcactctagcctaggtgacagagtgaaactgtgggtctcaaaaataaataaataaataaataaaataaaaagataaaatgttggttattttcgaaagatggcacatcagtttagaagccaagagaccaggatactgggcttggctcatcccccagtagatgccatgatgtcagcgacccatagcccttcctcaccttcctcagtagatctgcttttgcacttggtaccaggggatgccaataacctccaccttcctgtctttcagagtggctctgagaagcccaggaaacaccacatgggaaaatgcaaagctgaataaatgaaatggttgaagatcgtacttctggtaggaagaagttgataaattcttcctatggggaggggagggtaaggaaggggaggggagggcagggcaggggacgggaggggaggggaggggagggatctggatctagcctggttttccctttgctcttggcaggtcttggggcacccaggagccaccatggggcattgcactttacagatgaatttccctacctttgcaggaggaaaagcagtggccctctggttacttggttgcctaggatttaaagctgggagtggactccacagtgcgtttttgtttgtggttggaatttttgagttatacactccctgggctgttagctgaaatattagtgcatcctcacaaataaaatcactccaggaaaagcgttgctagaatttccaacaaaggctgtctttgcccttccgcgtacttcctagatgggggttcttaagccactcctcggaatctgaatcctaccaagtgatgcctgccttctgcctgctaccctgggcccctggatctgctgtcctctggcacaggcatcatttgctccctggaagctggggaaccttgcttggcagtcactaggaaactagcttagaaaaacagcctccccggcacctgtgccagcaggcaggaatccacctgctttttccaaaagtgtttgcctgtagggagactgcctgaggcccacgtaaattcagaaatttctggggtttggcttagcaggcccagagggccccggaagacactgagtgatttccctctgtggcgtccgtgagagtcagtgtcactgctggtgagtccatttttcccactcagagagttggggcaccccctaaataattgaagtattagtatcagtttctttccccttctgcaggcactcccagaggtctgccgttttctttgcaagaacagttggcattaaatatgctgggtgtcagtgcagcagttaggtggttaattttgactgaatattatgctatataaccacttggcatttaacttgaaaaatggctttctgcttcacctgtcagcatacccagttctcatcaaataagtgagtgagaaaaatttttaaatttcaatttcctgatgctattagacactacttcttccatacttaaacagtttagcagtgcatgtgcaggtttttgtattcagaccatgcctgagactacatgctattacaatagcttttttgtttaaagggtaaagagatgcatggatctttatcttgaggttaggaaaatgtattgcaggaacacggccaatcaggttctgaataactttgaaacatggtgccatcaccccagtgtagtacaaggaattccagtgcctacagtagaggatttgagagtgtcagaagaaagccttagaaatgaagtaaatgtgcagagtaatcccgcatggtacttcagggggaaattgatcactcaggttagcattaatctatttttactgtttcttttgtcaattataattcagtaaaccatgccaaggacttacattcatgaactctctatgtttaagattaaaaccccaggctcatccacttatgtgaattagacatctccagttgttcgtagttcaaacaggttgattagtgtcacctcattttgtttatacatcccgaaaatgaaaagccggcagagggaagatgacagtatttgatttctatgtctcagaaccactttgtcataactcatttttatggtggatgtgttgtgaacaggatgggaaacgtgccttgtttgtttaagaaagggtcaacaagctatggcctgttggccaaattcagcctgcctcttctctggcctgtttctgtaaataaagtattattcggacagaaccacacacacttatttatcggtttatctgtggctgttttcaatctgcagagttgagttgtcccaacagacacagtatgactcataaagcgttcttatcggccctttacagaaaaagttgtctccctgtaatttcaagcttcaaatgctcattttcttccttttgtgattccaggcctaatttttccatatctttagagggcacatttctagaaagagtgaatggcttgagaagttttgtacttttgaagaggttttttttttttcttcacttaggctggatgagggggatgtgaaatcattctgttttacagataagaagactgaggtacagcagggttcagtgacctgttacaggccacatagctgggaataaaaagacaaactccattcttcatgggaactgtggggattaaatacatcagtaaatgtaaatgggttgaaaaaatgttcccagcatagagcaaatttgcaatccttgctaaatatgattattccctttattttcattgttccagggccctcaccctggtataccaggcaaccaggaagaagggatgcctgctgctgtaagcctgtgccagcaacacagagacccaggccttcagcccaagcggggctctgtgcctccatcggaaacatgaaccagatttccttgtaatgggctccatatttaggcccagcagccttagatgtctggccaataggaaagctatgtccttcctgcacaatttcagccctaagaatctgtgactctccctccctggaggcctagagaacaagaggagggagggcttgaaatcaataaatggattgcacacctgcagggctctgccatttgtcatctgtgagctacgcagccattctggggcttacgctatcctgagctgcgtgtgtttccatggtctcccattatgctccactttgacccctcaaaatattgtttcaacttccaggaggctggatgatggggagagagaggcaaagagagagggagggagcaagggagttggcagaatgagagagggagcatgtccaaaaatgccggctccagccaactgtatcagatgccagctgccaataccaccctggtccctctgaggtcagccaggtagctggagcccttccttgccttccaggcaaacaggctgctactccaagggaaaacagccctcaaatgcagccctgctcggcttctcagaaggctagggaggagaaaggggattgaattaaccaagatatccaacatatcgtctccagggtgaagtagaaaatcaacagcatgacctttaaggccactcactcattcactccaagataaattctataggtgcccatggtgtgctggggaggagaggggaggggaacggacagctcctacccctaggagctttgtgtcacccatgtcatcagccgaagtgctggcttaatagacggaacttgttctaaaggtatgagaagagtaaattggagatggtaattgcaggaagtgatggcagagggaagaaagaggtggtgttttaggagtagggtctggagctgttcccataaactagggccatggaggaagcggctgcccatgagggttgtgaaaccacagaggtgatgccgctacaggcagatatgccacccctccacaagcccagactctcaggggtactgcagacagttatctgggctcattccctaaggccccttttaacgagagagtctcaagacagcggggctgggagcctgtgaggcaggaagaaagttccagctaaaaagacaatccccattagttcagctgggactctcaagaagatgagcgctttcctaaatgcaatgaaggcaaggaataagaaggatgggctttcctcccaaggctgctgggagctcacttggtgaatatgaattggtctccttgccaggcggggcctcagctccccgacctgtagcatgggatgactgggttggctcaaaggtgttacccatccatgttatcaaagagaacagttttaaagctcaccacttagaagatggagctttagagaaaagacagtacccaaggactctcaggagcatcgtgcatggggcctgatatggcaccacagcagctggggtccagagactctggaactgagggctgagcctgagagacgtggtgtgagtgtgagtgaacaacgcattggcacggtaggtgcgtgtttatgcatgacagtcttcaaaccctgcttctgcagaaagcacagtgaccatagcagatactgagttctgtcgtggtagggacctgcgccaccagggcctcccttcgtccccagcagcctggagcagggcctgctgcgtccctccccagccctcacccctcccagccagttaagagagtctccagccaggaactgatttgtggatgtgcctcaaggtccgccagtgtcacagtcccgtgtgatttatcgcctgctccacacctcacactttctgttgtgtgctaatgccccgtccttcatatctttctttaatcatgagagagtaattgtagatatttaaacacttgagtttcctgcaggaatttcgagactgggttttataggccttttataacagaacaaatcacagtttggatgaaattctgggaattctcttgcaggataatcatgttcagattgcctccctactgctagcttaatgtggctgtccaagtttgggatttactggggagccaatttgttttaagaaattaacaaaaccgatacctaagtaccgcagtgaacataaagtttttattcattttggtgaaagggaaaaaaaatacccaacattctgctactcacaaaacagctcttgaaaatcatctttatgaaattgaatctctctccccaaatgattccccgatgctaagcgggatggccttgtaataatcactcccttgtattcgtgcgttaaccggttcaaacttcacaggctttgcccaacccaagggtctcatggcaccggctttatactttttaaaattttatttatttatatttttatagaatgcagggagccacacagatgagagagaattctcaagtggggaaagtcatatgtggactgtgagatttagacacaaaaaaggaatgtatctctcacaccccacaccccacacatacacaaagtagatttttttttttccaaaaatgtggtctggaaaaaggaaggaagaaggatgcctgtcatggagctggatgtgtgaaaacctctttgaaaagcaatgacatttcctccttgggggacctcatcttccctttgctcctacctggtgctgaacacaggaagttcgtgctctcccttcaccatcacagctgcttgggaaataaaccacatttaaatcaacccctttgtatctgccagcagctgctaggcctctgaaggaatctctcctctcaattcccttttggtgaaagaaagggaatttgcacccagacaggggaggctccctgctgggcacgagctgactgagtgccctggcccagggcaggtgtgggtgtacggaggggtttggggaagggccctgagattccatttacccaaagggtattatgactctaaggtgccttcttagtctgcctggagagtggggagccaccatgggagtccgagaccacggacaggacaacagaaactcactgctggggctcattccctttgggcagccccaggcagttacaaccaggatgactgcgacgctgtggaaggagcttgcagccagtggcccttctgcgtgggcctctgtgcggagcatgggcagaaagaaaggaaccaacgtactcagcaaacagtgctcggtgtatctgctgccaggcccagtgctgaaccctccaggtgagacaactcgataagacactactgccccgccatttgcacctggggcatgcgtcacaggtgtcccaagacctgcatggattgatttgctctctctaggtaaggacactccttaggattgatgccactgtccaacctggcctcctgaatatgcaagacagagtgtgccagggaacaaagttgccacatttcccacatggtccagccctgggtaaggcatttcctgggcagtgcaggcctctatggccctgttcacctcattccctggagtcttgtaccctacacacacgccctactgttccctctgctgcctgggactcccagccgtctccaccagccagggcctcaccgagggtccatgcagatcttagctattcacaccggatgctcctggagccaggatgcggcccttcagaccttggccatggtcctgtgtggcccatagttgtggcaggcttccacatctattctttcctagctggtgccaggtcccagccctgaggtctggggtagaggctccctgggctgccctggttgtgacacagatggctctgaatgtgcttggctttccagagcctctgcggcacctgtgctctggtcctgcctggccctgtaggctgcgacttccccaggaggcccagctcactgttggaacctacttgctacctgatagcctttactgcagttctagcctagaacctagaaccttgacggtatcaagacagtcagatagtggtgaaatatgaggcagggcagctgtttgctccacgtgggtgtggggctccagccggggcctcagcatggctgtttctccctcaagtcgcctcctcggtgccccctgccgacccgttgaactctccacggccttgagctgcacccacctcccttaacaggcttgcagggtcctcaccaaagcacagggctgcccctctggagggaaaaagcctcaggtggtgctgctcctgccttcctgtgaagtctttccagtctccccacaagcatgggttgagcacctactgtctcccttcacaaggctaagagctggggatacagcagagactagacaaagtccgtgctctcctagagagtagagctcagtagcggtgacagatcacccagaaaaaggcaaatgaagatcattttccacagtgagaagggccagaaatgaaataaaacagggtgatcaggatgggatctgggggtgcaggtgcccacattagacatcatagtcacggtgagtctctctgacacttgaggaggtgacccttacaaagtgtcaactaaggccagtgctcctgcctgtaattccagtgctttgggaggccgaggtaggaggatcacttgagcccaggagttcgagaccaggctgggcagcacagcaagacctcatatctacaaaaaatttaaaaaattagccaggcgtggtggcacacacctgtagtgccagctactcagcaggctgaggcaggaggctcacttgagaccaggaggtcgaggctgcagtgaaccgtgatggtgccactgcactccagcctggacgacatagcgaaatcctatctctaaaagaataaataaaataaaaatttaaaaagtggtgactcagtgagcggggcagccagcatgcaaggattggtgggagggaattttgggcagaggaaaccgcaacagcaaaggctgggaagtgggacagagcttgcctagggtggccggggctttagggtacgaggggaagagtctgcccactgaggcctccgagtctgagagggaggcaggggccagatcacagggcacagccatcaaggtgaggagaagtcgaggctgggctccatcgtcctgccctgctcctggctgacgtgaacccgtcacagcctggaaaacacacacttgacacaagcctgtgccagcagggattaggagaacattgttgtcttagaagaatacgtttttaattaacaggttttatttaccaccgtgcgttctctcttgctcacatggccctgttaaagagcattttaaattatcagcttttatttatcacaagaaagtctccccagtacgggcactttcctgttgttccccatgctggcctgagcgagcagggagatggggagaccaggagttcaaccctgtcctctgcaggcctggccccagccttgcagttggacacacatggccttctcctctcctctttcctggccgctgacaccggggcaggtgacagtcaccttttctgatgtggtttgcccaagcagtgtctgaattaaatctcgccagttgaagcctgccagggtgctgctggtccagagagctcactggggctgggcaggaaacattgtggcttttgcaccctggctaattccattgcgcagctttcaatgccactctatttaaatccctgtcagaaagcccttaaggacagccagttttatttactgtcaatgtaaccactcctttggttgatactggcctaaacacctccaggaaagaaagcccgggctcatcaactggacctccatcctgccgaaggaacaaaggaggcttcctcctctccttggcatatgtgcatattaaaaaatttattgaacctattttaatatccttcgactaatgggagagttttaagacctttctaagtatagtagtagtaaatcctgctgcgtatttcacccaaatatccaaaataaaaatacctttgattgagagaggcgagtcgcccactggggcccataccttcagtttcagtagctcagttcaacatcaaaaacaacaacaacaacaacaaaaaccacattgtagcaatcagccctctaataagcctctaactcggtttctaccttatcccaaaggtataggaaatagcactgctttttttaaaatatcaagaaaacatcatttgctctaaaatgtccctaaaagcaggtctaaattgccaataaaggctaggtaattgtatcagcatggatcagaaagcatttctcaggcccgatgaaagagtttgcagggctgaaggactccaaagctgctgcccaatcccccccacgcttagtcaacagcccgcaccagcagttcgaagggagattttcagcacaatgcaatttcccttttaaagccaaacgcctctctactccccccattctcattttgttctaatttgttaaacttaatttcttctgaggagttgtctggaagctcaggtcaaatcagagaaactttctggctgtttgtttttgaaaagcagaacgttctccttcctaagcctctgggtctgaattacttaattattctctccttttcctcctcgtccaggtgaatgatatatgcactgaaaaagcaaactgcatgggtggcttgtcttcttaaccacatcaccagcctcgctctccaccttagagcactataatcacttgactagcaaacacatatacagtataaatatttaagaaaaagtaaattctattaagccactgtgtgatagatgcagtggtaggtacttatctttgaaatattaaactctagacatttatatccatacaaaaaagagtttcctgccatttgatgagaattatgtgcctggcactaataaaatattaaactccaatttaaaagataagtatcttatccacttttttcataataaaacattttacagtgctcaagaaagccaatatgcatcagaatttccatacaatactgtatttacaaactttcataaaagttttgtgtctgcatttatcagtggctggtttcacactagcatcctgatcattctccctaatgatacggtgcatttcaataatgcatgatggaaggtgtacaaacagcgctttgtttttgtgtatggtaattccatatttttggttagtggttctccctggcaattaattaaatggaggtggtcactaagattgcattatcccttttggtccccattatataaattaatgtcaaactgatgcaatgtttcatgtttaaaataacagatacaagtgttaaaaattatagcctgcagttttcctatttgacaatgcattattttcagctgcaaatgtcagtttctaacccctgccaagaatattgtggcgaggcaatgagtaataagtgttagttatcaaatttagtgtcttttgaaatttgcccgtgttgccagggtgggggtggggaagcagtcgatgcacttgtgtaaatttatggaagctccacttccagagccctgtgggaaaggaaaaggattctagcaggcagctagactttccacgacatcagctgcctccagccacagcacgcaggtcctgacggaggcctgcgagggccagccttgggtgtggtcccagtgtctcttggcctggggatagttaagaggtgagaacagctgaaacgtatatgacgttcccaaagggtaaaacattttcaaagggcctcacctaattggacctggactgcataagccccagtcttttcattaaaacctgatgtcaaaagctgcctatttgaaacctcctttgcctcggatgttgcgggaactgggctttggccatggatgggatgttcctgagccctcaagaccattttggtctctgggagtgggattctcccctgacccctggagatcggccttgacaacaggatttctgttagcagcctccttctcttacctctttgttttgatagatgtcaaaagacagttctgccttgaaaaatgtaattactcaagaggatgataggaggtaaaaaactatatgagaggtaagttgcatgatgttttaaaataaacaaatatcaccttgggcacaaatcccctatgcacccccacttaggtttggggttgagaagtggaaggtgcagcccaagtctgcgccagctgactcctgagcagataaaatatttagattgtgtgatacgtgtagagcaagacaaactaaatggttctaacatctagagacactttcatttctcagggcaatgccgggtaccccaaaacagtgttccactggaagagacctttgctctttgtgaaacttggtcaccatcagagaaggggtgggtgggcatgcctgtcccctcctcagaccaactgaagcttggccagaggtgtcctgtgaacatcgcccattccatgccacagagaaaagtactgtcaaattttaacagagagcagaggcgtctctccacagagatttttaaattaataaacaccttgtagccaaagaaatagctgatttgcaggtcttctttctgttgggcatacgtccggatgcagtagatgaaaatatgttttatattatcctgggaatgttatcgtaagtggttgcttttgcaggtgtgagggaccgcggctaacagtgactggtgactgttgtatcgtttggccacagacatcagctaaatcctgaataagaactctttccgtttcttccagaagatgagcagtggtagtgttccttatttctgtaaattactgtagaaacaataggctgcaattatcatcacgtttgaaaagcatccactaattacactcaggataaacggcacttaatacctatgatatctattgtgagcatatcagtgtgatgccctagcctgcactgatacttttatcttctaatatttggaagaaataattgctctgaaaagagtaccttaaaagcttggcctgctgggcttctcttcagcagctgtttcacgggctggggtctgaggggcacgactcagcctggactcctttattctggggcagagaccgcagagttctgcctcggacactcaacactcactacctgtgtgatctcaggtgagtttcctaacctctctgctgtttccttcaacataaaatgcggatgagaataaggctcgctttgtagggttgttaggaggatgaaatgcatcaatacattgaaagcatttaaattgtccttcctgtgtatgatttcaaggttccaaaacttagtcctggaaagttttcctaaagagcttcacacctgtgatccgtgaagctgaaattagaatgttgttctcctggtcttaccaagagacctaaatgaaacaaatcacataaaaaggagcattgaagagtgaatggcatgcaaaaaaagatactgataacaataacaccatatcattgaaagcacagccctaatttatttattatttcatgcccgctgttccctcatctccagcctttgtctaagatgagaccttgggactcatctaaaggcttttatttgacgctttccttgcctctcatctcacacatggaaaaaccctcctaacataactgactattggcagcttaactgaaaccctcccttggttctccattgccacaggctcaagttcaagctcctagtcttcattcttccacccctgactgtctctccagcctcatctctacaaaaaactcctctttctccacatactccagccagatggaaccttttgtagttctttgaatatgccgtggtctccctccattcttccactccacttttcgcagagcattgaatagttacaggcaaggactcaagaagtagactccccgggttcaaacccttgccgaggtcttccagtgagcaccatgggagccccagagccaatcgatttccacttggagctctaagcttggagaagctgtgtgaacttgaataagttgattacctctctgagccttggctttcccatcgataatatgggatatttatctcatacagttgtaatgaagattaattggttaaaatataaaaaatgctaggggcattgggtgactttgttattaagaaagggtaagtcataggcaagtttcaaagatctgtctcctgagatgggggagaggcctctttttttttttttctacatgtggattctaagaggtttaggttcaagccccctctttcccaagaagactctttagttctccatcccacatcaatttatgctttccccaaatcctctctcccactgtgccatgctttagctttgcatgggtcagtatttggtcatgacctagaattatttcagtcttatctctgccagccagtcagatgctggaagaagggagtctcgtcccagctctgccccatgaccagggctgagcacacaatgaacttggccgtggactgattgacacaccaaagtcccgccaagccagccctttgtcccatgggatggcacacacaatggccaactcctccaaggatcctcctcacacttcctagcctagttcacatcatctctgttccctgtgcccaagccagccaggtgcctggccaaataattacataatggggctggagggagatggagacacaagacagccaggggaagggctaaaccccagccctgctgccaaatcctcccattccaggagtccaccttgacatccccagatgatcatgtctcataggatgtcatcctattagcactttaaggaggcagagaagcgtgaagccaaactggtacttgaaatgtccataattgaccttttaaatcactaatgtgtcagataacctggtacgtgattgtagagttgttttggatgctgttctggtcatgttcctttttctaatagaaaaaaaggtggagggaagtatggttctctataatatgactcttagttaagaaaagttacaagaagaagaaaaggaggagagaaggaggagaaaggagaagaaagaaggagcaggaggacaaggagaaggaggaggaggaggaggaagagattaaagaaaaggaaggaaagaaaagaaggaaggaaggaaggagggagggagggaaggaaggaggaaaggaagggaaaggaaaggaaaggaaaggaaagggaaagaaaggaaagttaagttaagttgaggtctcctgcctggctctctgggacccctgtgtggacaaggaagaactgccagctcactgtcctccttctaacttgaagctaatctcatggaaaatacgatgcctcaaatctgaattatttgttctgtgtgtcagggacagggtgggtggcttctgtctgcaatttaaggtaaaattaacgcatatgcttctccagtattttcacagtataagactcccagccaaatgtgagtgtttccacacacttccttcttgagaagacagatttgcatatgcattaaggccattttatcagaatgcacacacagaggaatgacacatctcactgacagcgcccgggtgacagataactccacacaaaacatacatttgaaaggaaaataggaggaggaatagaattaaaggccggtgtgagagtggcatcgtgttttgagtgaggcagcacagattggattgtttgattcacttcccggctctgcgtgagtcaggtggcgacaggtgctcctccaactacctgagctccccgggaaggtggggggtggggggcggatgctgctgggccccgcagccttaatactgcatgacctcatcaccgaggtacacagtgagcctcttccctgtggcagctgaggtctggcccctgaccacctcactatctcacctccctcacctgtaactttgctccggtgctctggccacgtgggcagggcctctggacatgcagattccactgccccaaaagctctttctgcagactgtcctgtgggggcccagagaagctcatgccagttaagctacgaggaaacgcacttgctgggtcctgttagtgccagggcaggtagagggttcaggtggggagtggagactggctggcagtcaggaagcatttctatgctgacatttcagatgaagacatacagaactctcaggagctcctgaatctccaagacccaggaatttcttgtgctctcctcttattctcagtaaatatttactttcatatgaatatttttctttttattttgttaattttttttttatagacaagatctcatgctgtcgcccaggctggagtgcagtggtgtgatcacagctcactgcattcttgaagacccaggctcaagcaatcctcctgcctcagcctcccgagtagctgggactacaggcatgctaccacgactggtgaatttttgtattttattttttgtagagtcagagtttcactatgtttcccaggccggtcttgaactcctggcctcaaacgatcctcccaccccagcctctcaaagtgctgaaattacagatataagccaccatgactggcctataaatatctttctcaaaaggattccacaaatcgtaaaagcctcaggacccacaaatcattgatctgtcttccacaagcttctttctgttaatttcacacaaatattaccttctcctatgggccttttgcaatatcgctcccatctctgtatcactccaccctttaccctggcttgtagaaattaactcttctcaaaattttgttagttcattcattcatccatgcactcatttgagtttttgttcttcatctgttctacatctagactctccatgaccacaggcacctgctctgttcactcacctgcatatctctgcatctagaacagctcagggtaggtgtggagtgaatggtgattgcatgagcgaatggctgccaagtctacccatggcttgcccatcctctggatacatcatctacttctctggaactgcaagctttctcatgaaatacgaacggctaccctagatgtattaagttgctcaacccatgtcttctatgcctcacaaactgggctgggtccaggggtctagcaaagaacaagacagatgtagcctctgtcttaatggatagtgcagtttgtgaaagacagacattgaacagaaaatcacacaatcattcagtgaaagttgagatgggatcattggaaggcttatgtgagagagcagcagcatctctctgtctgctgagacacaagcaaatgcttccaaagctctgtccacatctagcatgcatttctggtgctgctcatcaaccaccaatgagaggctgggttgtgccatggtgtctagaagcaccatgtcctttggtgttcctgaggctttcagcctctctcttccctgaaagctggcatggggaggaagggattttctgccacccctttaccactccccaacatacatatctctaagtctaagggtccctggagcccccaaatcctgacagccatgttaccaaatgaggcacttcttctctcacttgccagctgagtgactgcttctggtgattaagaagagtaggagtgaacagcagagggtgtggccgatgtggagtaaacttacttgatagaaaccaacttggatagggtcttcgcattctaagcatttgggaaattcaagttgaaaacttaaacataggcaacatctaaaccagggttgtccaatcttttggcttccctcagccacattggaagaagaagaattgtgttggtccacacataaaatacactaatgctaacggctgctgatgagctttaaacaaatttgcaaaaaaaaaatctcataatattttaggaaagtttacgaatttgtgttgggtggcattcaaaaccatcctgggccacgggttcatctaaaccttccctttttattagatttctgtatgatacatgtagataaccaatttgcatttgtttttttccaaagcactgaatgagctgttctggctgtcttctgttttataagtctgtgcacctgagttccttgggaaccctcttgcagagtttcaccacctttattccttcaaagccaccaatgccctgaagagcagcagctcagccacctgggccaggtccgtgtgctgatgaaggtggtggctggagtgtgatacccataataaaccctcagccaacctttgccggatgctgagatgctgctgttagttgtgcatgcacctgctaggcccactcatgtactgtccccaagtcactactgtagagcaaacaatgcaacttgtgtgttggggattgacctcagcaaattataagcaattaaccaaatttgccctaccattaatcatattattctgcattgccgattcatatgaccccaaaattgccaactcttttcagctgttagagatgtatatccaggaacaaatgactgccttcaattctgtctccatcctgttcttcgagtcagcacccagctgaggcacgtggctaacagtgggagaacaagaattaccatagatctgccaaggatcctttgagagaggacaaaatagctgaatgcaattaagcctattgtcagtggctaaggtacttggaatgacaggtgtctttgaagtgcaaggtattagcgctgtttgttgctaaattcccaacctagaactctatcattttgctaagaaattgcagcaaactcaatttttttctatcaagtgtttccctgggtgctaagtctatcactgttataatatattaattttttttcctttggtgacattgatgatggggtacgtcttcactctctctcacctggtaccttctccgtgtctttaggagagaatttggaattgctggaatattcttggccatccttcatttggaatttatgtggtaatttcagtgaaaccgagaccttgtgcagcagttttcatctttttcaaggctgcctctctttctcgagaagctggagagtttccaattattccttctggtctctttggatgtgaattgtaacagatcagctgagagtcgcagttcaacattgttaagcttatcaatataaatataatgttaaaccccttttagataattggagctatgtgtgaaaatgtgaccaatttgtgcataaattggtcctacacttcttcctggcaaagacagagagagagggaaagagagaccaaccatatgtgaagttggtttgcttcttctcggggactttccacaccttgaattcttgatctggctttgtggctgctgacagttggaaacctgcacaggttatgccaaaaccataaggtcctttgcccttttgaaccaaattcttctgtcttagaggctgcacggcgagtatcaacaaggcacttgcatatcacaccaatgggagggttgcagacagtcttgagaattaaacgtctctgcttggacaattaccaaattcaaagaaccaaatggagagactgacgcccatggagggggaagggaggggtgccgagggaaatcctggaactaactcatcccgcttggaaaccttgctgtcacttcgggatcctggaaaagctcatattctcctcctggcttctccttactgtgtgtgtttggggtggggaggagggtaggatggagggtgcgctagttcatttttccaggcgtaagtcctccagagagagttaggaggcctgagataattattctaaaactgcccacagcattttacagcttaaggcgagtgtttaacaaaatcagttcctcccaacaatactgagctaaatattattatacaatctctaccgataaggaagttgaggttctcagaagattaaaactaaaaacaaaaagaaacaaagaaggctattcaaggatacttggaaccgcttctgaagttcactctggagtttgtaaatttttacgcagtgcgtttccttacctgtaacaaagctgaaatgagaccataattaaggaagaaagtcgctgaggcgctgcagcctgtgacgtcatcaagcaggcttctggctggcctgaacgtggaggtggcaccgtgtttccatgaattgccagcccaagatgtccctggggctggaggcattcagtcaggagcaaaggctccacccctcatctgtttactgctagactgcctttcaggatgcagaatgcaagactcacccagatattacagaggcctgggggaaagacagacaggacctctccagcaactgctgtctcagataccgaaaggctctacgaggccatggtcttcgcgcagaaccaagctttgcaagaaagcagaattctcatttcctttactccggctcacccagaaaacagagtctacctgcaagccctccaggtttgacctctgactttagggatgctcagggtgggaggacatatgacagcctccccaaatccaaaagatgccctagctgggtaccatggctgacacctgtgatcccagcactttgggaggcagaggcaggaggactgcttgaacctagaagtttgagaccaacctgggcaacatggtgagacttcatttctactaaaaatacaaaaaaaagtaatcaggcattatggcatgcacctgtagtcccagctacttcagaggctgaggtgggagtatagcttgagcacaggaggttgaggctgcagtggtcatgccactgcactccagcttgagcatggaagtgacagcttgcctcaaaaaaaaaaaaaaaaaaaaaaggtgccccacgatctcatcttttgccctggaaagagagatgctttctgggaaaaatcaaagatatctgtttaaactcatggttatatttccaaatggaccccaggatgtaatgatcacatgtattttctcgactcttcaccttttccctctaacttggggaaaagtaagtgcataaaggggtttcttgggcatcacttgctctgttaaagcagcatgatgagttaagcagacatgaatcagaaaacatatggacccaattttggtttaaaaattaataggaaaacacattctcatcaaactcaaaacaatgaaaaatattttttaaggaggcaaaaaatccaaaatacagctgggtttgcccactccacacagattcttaacacccatggtctccttccttggttttcaaaaatagcaaattgtgctgaaggttgtgtggaaccaattaggacagcataagtgaggtgtgggcttccagcaggatggaccacccagtgcaggggccttacaaggcattgctggtggttgatgctgtatctctagacctggtggagcagacaatcagggcaagtccccaggatagaagagatatccacacagtgccagagtgaagaagtcacagatgtgtgtgtgacaggtaagctagattcacctactgaccaacaagctcacaagatggaaaaggtaaaccaaacccaagcgaggttcatcttctgtcaaccattagatgtgaccttaccctaggggaaggacagtttattcttcaggcatcattcccagcctgtcctccctttgataaaattctcttctctctttcccacagccctccagccatggattctcaacatcccagttgctttgagctgccccctgggatggctcctctgaaccaaagctgttccctggtgccccagcatgtcctgccagagcctctaggatgaaggagtttgttggcagaagtgacaggtgatgggagggaaaatcagaaatgtcaccctccatgggtatccagccagccagactggagcctctaaatggctccagctctttctagattttcctggttgatgactcttggagtccatcctcctggaagccctgagccaccttctcaccttgcccttccttctcaggagatgatcttggtttttactttaaggactaaacaaaagccatccgttgaacccattgtcaccatacccaccacgcttcccatatctaaatccatcgttttgtctctcctgccatgcgcctccccctgtgcaaagcgaatccctccagctttgcactgggttccactcttgtttcctcctctgggaccctgataactttcatcatttgctcatagactgctcatttccatgtaaggcattttcagcatggtgcttaaacgcacgctctggaagccagactgtctgtcattgtatggaaggcttgggggaaaacccagcttccctgcgcctggtgtccccatctgggaaatggagataataataattcccatctaatgggcttgttttgaatatgaaaaggttaatacatataaaacacttatacaagtggctagcacatcataagcatgaaataagtataggttatcttattatccctgcttccttcatgccaacatttaaatgtgatcatctctcatatttaagaaggaattctttctcaactcacatctacagccaactgctgtcctctctaaaaattcacccttgctattgattttcttgggtgagacaactgtgtgcgcctgttgcttttccctcctaatttctccctccttagtctagggtggtccagctccagtccgtccattcttgaaactgcttgcacgatgaacttcctgccactaaatccaaggaacacgtttcactcctgtctcttcacctctatgcacccttggctctggtgacctttttgctctcttccaatactactctgtgggctctcacaccctaccctgggcagttcctccttggcttcttttgctgtgcagattgataatgtaaatgcagatgtttttaagagtctgacctcacctattccctggttgttggcctgtggtaactctttccagccagccttctctcctgagccccgttggaagtggaccctcagatgtctcataggctcccatatgaagccctcccctttatccccaagctgttcctctgggagtttctatgtcagtggagagtatcaactcgcatcccatagtccaaaccaatggtgtaggggtcattcttcaacttttcctttactctacgttgattctatttcctaaatacctatcaggcccctcagcatctctccagctccacagccattacaccaacctggactactactctccctccctaggtcactaggatcacccttcacgtgttctctggcctcgcaccagtctcccctctgatgcatgccctgcactgccccagggagatctccatcgaaagttcactaaaggtttcccattgccctgatgataagcaccaaattccttaacttgcttttcaaagatctcgaaaccacttttgcaagaattatgacagggagaaaagtttaacctaactgactccatcttgcttctgacctcccaagttaactgtctttgctcattcctggacacaggccaagcaaactgtgggaggaattagcttataatttctctttgaaacaaggatgatcatagtccctccctaaattgaccccctccggggactgaaactgcctttgtaagactaatgaaaggccacaagtttaggattatgggtgtgggtgcctgaattctgctaaactataggtccagtgaaagaataaccagccattgttccagaagtcgcaagatttggaacttccccagtcactcctgtggataatatcactattgtcaaaacataagattggtctctgagatatttttcagacttttgtgttctggtgactgactgactccacctggacccatgactcacagcaaagagcttattcctacccagaaactcccacctagaaagtaacacagtgcattgaagtctgtttgaacacccctgtgatttcatccccaaccaatcagcagcacccgttccctagccccctggccaacataattatccttaaaaactctagcctccaagctctcaaggtgacagttttgagaaatgcctcctgtccttctgttcagctggccctggcattaataagctatttctctactgtaacaccacggcctcggtgaattggttttatttgtgcagtgggcaagaagaaacttatcgggcaattacagtcttgacttactggcatctggtctcattgccaatggaagttctccatttcatcttttatagtctgtgtttcagccacatgggttttagtggacttttgtcatgtattggttgcctagcatctgaatactttattttgatttggggaaattctcctgtgtgaatttacaccaaaagggctttagatacaccctctccccctcactggcaactagcatgtgatcatgtgactcagacatggccagttaggtggacaatgatggcagtgccccgccagtatcataatgaaccttgactgggttcttggcagcccaacttcctttggctactgcttgattcctcagtcgtcctgtccttttataagctacttaatattcttccaacaaattccttttcctctgaagttaaccagagtcagggtctagtacttgtattcaagaactctgacactgacataaatttttttgcaagccctctaacgtacaaggcatgtgtgatgctatctgtacacacttcacttagtttattcctaccaattcttcagacctggatttaagatttcttcttcatctgaaacctcacccatccctgcctcatttagaccagatttggtgtccttgtgaatgctttctgtagcactgggtttctctctgtcatagcactcatcatcctaaaatgtaattgcttattaagttgtctccactactagaagcaaggtgctcaaggaccccacttgttttgcctattcttatattcccagaacccagcatagcatctgtcacatagtagctctcactaaatatttgctaaatgactgaatgcattgcagcctcatcccagtgcccaaagttgtgactggaccctcctttaaattcaaatatctttagagatcttcagctcccaacatcctactgtgaattactttccaattcatctccaagccccacctcctagctctctttacccactctcttagaagtccactgccatggccacactcacagacctggattctgtccttggagaagcagatctgtgatgtgccattttgtggtagttatgcatgagatgctacagaggcacttgaccgagaaacaagctagagggaaacatcctgccagaggctttggaaggagaagtgctgtgtagggatggtaggagtgaaaaaacagaaaaagaacaaggatgagaaggtgtcagtctcccccactagaatgccagttccatgtgaactgagtccctttttatcattgctgtatccccaagtctagagcagagcttagtgcatggcaggtactcaatatgtatttgttgattgattgattgattaactgattgaatgcatattacctacagtgaagcaacataaaatacacatgcaaatatcttgatatttccagcatgagggattcaggaaacattccatagagcaaaacatgcatacagctctgctcattatcactgattgaagatggacaaagtgtaatggtcatgcctttatttagataacaccagaaatacttagtatgaacactttcacagtgtcatttaaacacatggtcttctaactctcctttcctcacactatcttaattcattgcccttgcagtttcccaatttggagtttctgtttcagaagcgtgtccccctggggaagcatacaatcctgtcctcctccaccttcatccctggcccctctccacataacagtgtctgatattccttccagcccattctttatacattgccttcccagctgctccaccccactcctactagaaggcctcattcaagtctgacctgctctgagaagcctctcttcatcaactcggtcctcatctcctgcccttttctgaacacttacaggacctggttctatattgactacttctgctctgtagttgtgtcatttatgagttaaatctgtcagagataaaattaagtctgagacaaaactcacagcctgtttattcataaatacatagtaaggaaacccatcagctgtcacttttgtggacaagtgttcaggggtgttaaaggagagttcttacacagcgtaaaaagaggaaatacagagacagtctctgattcgcaaatattatgcttaggtggaattttggaagctggagagactttctaattggtcttcaggtacatttggccatccttggttggcggtaatttggggagatttcaagaaaagaagggttgttcaacattggggtgggggtttcctgtggctggtcatttcctggaactggtgggtggggtactcgccgccgcggccagcagtctctcaagtctgatactgtagctcatgggctgccatgagggagaaatcacgtctcacacgttgcttgtatgtgcttcccgtcttggcgtacagccaacgttcagtcctatttccagatttaacatgaggacttgttgaatcggctttggagaaggaaaggtaactgtacagatacatgcacacccactgtgtgtgcgtgtgtgtatactccactagaaaatgaataattgatataggaaagggacatgaattgatatgtactttacatactgctctcagcatctccatcaaataaatccatcatatctgagtcaaaactcatagtctaattcataaacatgaactcatcagccatcacttctgtggaggagggtttgacaatattacagagtaaaaagaggaagtcatgactatatgtgcccagtgtctggctggttttgaggtgactgggaaagctacaatcaggctgatgatgtctacagaggaccatgctgcaagccccatcccatgagaagaaactgagctgcactagctgagtttctaaatgagccagtgagtatctatcaggactgggatgccctgggagaggtaggagtcacctgaaagtttggaataaccaggaacaatgcataggaagggaatattgctgcagcgctgcctatgcggatgaaaatggaaatttcacaatggcgtcatagagcccaatgtgctatcactccattggaaacactaatgtgaaacagaagtcagggggtagaacccacagagaataaaaaaccttttgggaaaatagatgctcaagaaacatttattgatgaacaaaaattcttatcagtgagcaccagatcactgcctcccagcactgatgatgccattttgcattttggccacattgtggatgtgggggctggtgacagcacagtggtgaccagtgaggaatggcatctggtcactccaatggcccagccaagtgagatactcgggagctggggtgttgggagtcaaggcaacacttaacatagccaaactattctgcactttagtgaccaagtactcgggggtgggagaagagcaccccgagggtagatggcattgaatgtggctgcgtctgcaaatgaacccatgtgcagcacaaaatctctccagtagctggctgtgactttgcatctccccgtggcgttttttttttttgccttctcaaaattaaatgacagagtcattttgcacttggagtttccacagtataaatgcaatggtcagccttttgataaatagactttgaaatgctctacatatgcctaccacaagcttttatccatttggctaattttattctttgtaagccacagaagacggggaaaatggccctgtgattagatctagctcagagactggggaagagaagtggaatttgagtcgtcctgaaaagcctgagtaaagcatcctttgtaagaaaggtggaatcagagcatcaaagaatcttggggctgcgaaggaccttcgggttccgcaagccctatgactcccaacgctaaccctccagcctgggtgtgtgcttttttcaaagagctccctgggttggctttgggtaggtggctgtataacaaaacagccttggcgttacgacactgggttcaaaactatgtgtttctaccactgttctgtgcttccgtttgcttttcttacaaaaggagggaacgtagtatctatctcatagggttcttgtaaatagtacacatgatcacccctgtagggtttttagaacaggatttagcataatatgtcaatcatgatgaagatcaagacgaggaagaagggctaagttggcaaaccactgattcaacctagctgctgacacagcccagaagtggtgttttggtgtcctgaaggtgtcatgctctgcattcctgctgtggacagcctggctgttagagtgtatcctgatctgatcctatctatagctctgcctctggagacggttgccagcaagcctgggtccttgctgtcctgaaagctgttgcagaaggcctgggctatgctgggtttgactcaggatcttgcaggctcactatttccctaagagcaggagctcagacagtaagtccccatggagggcaggttcttacgggtaaaacctcagagcagaacatttgcagggtcctctgctgttaacatgcagggattcctccctatcctggtgtcttaggtcagatttcctcaccacctccagagccctcaactcagcatgtcccatgagctaatgagaatgaaccctgtattagtccattttcacactgctgataaaggcatacccgagactgggtaattgataaagaaaaagagctttaagggactcacagttccacatggctggggaggcctcacaatcatggcagaagaggaaaggcacatcttatatggcagcaggcaaagagagaatgagaaccaagtgaaagggcaaaccccttatagaaccatcagatctcgtgagacttattcactaccatgagaacagtatgggggaaaccgcccccgtgatataattatctcccactgggtccctcccacaacacatgggaactgtgggagctacaattcaagatgagatttgggtggggagagagccaaactatatcaaacctctgctgtgggatgttaggaaatgcctatcaggctgtgtgatttttgtcccacagtgtacacattttctggagaatcacaggacatgaaaacaaatatgatttcattacatgaacctttccagtgtttgaccaaatattaagcttatcaggccaatttaactgacagttatagcatacttcctgaatccaagacacagagccaggcaccaagcaggaagaaggtggtgatatggccaacagaacagaaaatcagaagccctgtagtggtggtgccacggaaacagtggaaggtgaagtttctgcatgggtcaggcatacattggtgaggcacattcgaggccagcctcatggatatgtcacctgtgtagtcccgcaggtctgtcactaggaccccccgacctggcttattgtcctattgttgccattttgaaattcttttttttttttgagacggagtcttgctctgtcacccaggctggagtgcagtggcacgatcttgattcattgcaacctctgcctcccgatgttcaagagattctcctgcctcagcctcccaagtagcctggaactataggtgcccaccaccacacctgcctaatttttgtatttttagtagaaaccaggtttcaccatgttgcccaggctggtctcgaactcccaacctcaggtgatccgcctgcctcggcctcccagagtgctgggattacaggcttgagtcactgcacctgtctgaaattcttaatcatctttgaacaaaggtttctgcagtttcattttgtagtgggccctgcaaatttgtagctgttctggatttaattgtaaatgtccatggcctgctgacacccactgtgtactgtacctcttcttcctcctcccaactgcccaaaacattggattgtctctgagttaaggacaccagactaacccacaatctctgctcccagaccctggttgtcaaaagctatgtcatttttctgtacttgccctaaagttgcacaggaaaagccccatgtcccaatgtgtgcacacacccctcaaagatgaggtgtcccttgctgcagttcataccttggctagaagagtcagcgttttgtgtccttggctaccctgagaggcttaagaagctttgctctattattttggagaaaaaaatcaggatgagtgagctgcctgccccgggccacagctccccaaagtctggctcaggctggctgctgaggtgcagcattgaggagcccgtttatgattttgatcactgctcatcacaaatgtccacaaccagacttctctttgctcgtaggcagtagacaaagcaatcatgcacattttatggaggaggacgctgaggctctgaaaacaagtacttgtttgcacttcctggtgctttgcttggctgaagtttgagataaagaacgggaaatcccacccacagactgtcagggttgtcatttcaatgccattctcaggtagagaactgagctagcacatccacctttggaagaaatcgccccctgagtttaaggagaagcctgcacattgcaggggctggcagaggggagcagtgctgggaaagactggaaaggcttagcttcttgccaggaatttccattggaacatgcctcgtgcagactctggaaagacaaactggttcttaaaatatcttcaggtctggatggctgggctcgccaatccttccctccatgtggcagctccttcttgactagcatgctctctgtggttcttagatcattaacagagaaaaccagccaccactggggactgtagaaggtggataaagaatattccattgtcatagagctttacagggattctggaaatgacagcccaggataactccctcattgtatagataggcaggctgcagcctagagagaaggaaggggctcttactcccatcgacctcttcaaaactccgttactcccagattgttcatgctctgatggccgtggcggattgaagcctggtttccaaccaagtgccttgtggtttgaactaggggcatgcacttacctcagtgggactaccacagtctttctcctcacactgtaaaatctggactcaactctgattgactggtggaggccctggagctttgagatcatatagagtgtggtccaaccttcttccatcccatggatgttacaggaggtaaaacccactaatgaagggaatggatggaagccaaaaggaaaacaacccagtcagttgcagaaaggcagtgagcgagagtcctcttggttccttctgcttctaaggacctcattccacctaatgatttcacttgtgggtcatcctcaggctgctgtgggcacaggttgcacggcacaatctggggatcctttgggttctggcagcctcagctggcagcccctccaattctgttttgtattgccctgacacagatgcagaatgtacatcctttcttcagtttccacaactagtcacttagaacattctgtgcactgacttccctaaagtgtctttggagagttaatatgaatgtcctcatgtcaacacaatggacaaagcgaatatggacaaagcattcacttttaataccctcgtccctaaaagagatgtggccacttccataagtacaccacccccaccatctccttgcccagctgtggctctcctgccacttccgagggtctgatgatggagagggtggcagttgaggtaccttccatggctgtcctctctctcaactcctctgctcctcaatcttaccctacacgctgagttttatggaagaactttgatccaatggcagtggtctttggagggggatttattaggcaggggttgctgaagctgttctgaaccaaagctcaggcatcctgccatagcagactcgatacctggcaatatcaagtaggttggtattttacccatttaaatgtacagttttgtgattttttatatgtgtatacagtcatgcaattgccacaacaatgaagacatttaaaacttccatcattccaaaaattcccttgggtagttctgcagtcaatacaaccctcacccctagccctggagaaccactgatctattttctgttgctatagaattgtacataaatgaaatctgacagcatgtaatattttctgttggatttctttcacttagcataatgcttttgcaggttcattcatgttgtaacatgtatcggtgctttttccttttttatttattgctatatattattccataagatagttataccacaatttatttattcactcacacgctaatggacagccaggttgtttccagggtctggctattataaagaaagctagaaaagacttttgtgtacaggtctttgcacaagcatatgttatcatttctctcaggtaaataaatatctaggagtaggattgctgatcacaaggtacatgcattttcaatcttataagaaattgccaaattgtcttccgagtggctgtgccattttgcattcttatcctcaacatgtgagagtgacagttttcccacatcttcatcaacacttaagattgtcagtctttgtaatgttagctgttttagtgagtgtatagtggtatctccttatgttttatttagtgagaactacatatagtttattgcacttggtggtttataatataccacaaagatatataacatataaaaggttttgacgattgtctaagttttttcttacaaaaactaataatttttatgtttttttattttgacacaaaatagttgtacatatttatgggatacaacatgatgtttcaattcatgtataccttgtgcaatgatcaaatcatggaaattagcatatctagcacttcaaacattcatcatttgtagtcagaacactcaaaatcctctcttctattttgaaatattctatttatttatttttttaatttttttactattataatttaagttttagggtacatgtgcacaacgtgcaggtttgttacatatgtatacacgtgccatgttggtgtgctgcacctattaactcgtcatttagctttaggtatagtcacagtgctgtgcagtaagacaccagaacctattttttatatctaattgtgacttttacctattgactaatctcccaccattctccttccccgactctccttagaccctggtaaccactgtcctagtcattaagaagtatgaggacgtctttttaagttccacatagggatgagatcatgtactatttgtcttttggtgcctggtttacttcacttaacatgatgtcttccaggttcatccatgttgtcctaaatgacaggatttcatttttttttaatggctgaatggtatttcattgtgtgtatacaccacattttctttaatcatttttccactgatatttagtttttttctaaattaattaattattttttatttcaataggtttttggggagcatgtggtgtttggttacgtgaataagttattcagtggtgatttctgagattttggcgcaccgatcacataagcattgtgcaccatatccgatgtgtattcttttattcctcatctcctttccaccctttcattatatcacccttatgcctttgcatcctcataagtgctcccacttatgagtgagaatgtacaatgtttggttttccatttctgagttacttcacttagaataatggtcttcaattccatccagattgctagaaatgccattattttgttcctttctatgactgagtagtattccatggtgtatatatatactacattttctttatccgttagttgattgatgagcatttgggctggttccatattattgcaattgtgaattgattgatgggctcttagtttgatcgcatattttggctactgtgaatagtgctgcaataaacatgggagtacgaatatctcctcaacatacttattttatttcctttggatgtatacccagtagtgggatttctagatcatatggtagttgtatttttaattttttaaggaaccacccattgtggttttgatttgcgtttccctaaatgttagttacgttgagcattttttcatatacctgttggctatctgtatgtcttcttttgagaaatgtgtattaaggtctttgcccattttaaatcagattttttttgtttgtttttctattgagttgtttgagttccttacatattctgaatattaacctcttgtcagatgaactgtttgaaaatatttttttctcattctataggctgtctcgttattctgttgattgtttcttttgtgtagaaaaattttggtttgatctaatcctatttgtttatttttccttttgttgtctgtgcttttggagtcatattcaaaatattcttacccagtccaatgtcatgaagtttttcccgtatgttttcttctagtagcttcatagtttgggggcttacattaacccattttgagttgattttctatttgctgaaagataagggtccaatttccctcttctgtatgtgaatatccaattttcccagtacctcttatttaagaaattgtcctttatccactgtatgttctagacatctttgtggaaaatcagttgaccataaatgtataggttttgttcctggggtctttattttgttctattggtctgtgtctgtttttgtgctggtactgtactgttttgattactatgggtttgtagtacattttaaagtcagatactataatgcctccagatttgttctttttgctcacattgctttgggtatttttaatctttcatcttttatttttattttattttgtctctttcaaattttttatttacttatttttaaattttatatttaaattattattttattaaatttttatttgttattttatatttatttttatcttttgtgattctatataaattttaggattattttttctgtttctgtgaaaaatgtcattggaattttgataggaattgcattgaatttatagatcactttgggaagtatggacattttaacaacactgatttatccaactcataaatatgagatatctttccatttatttgtatctctttcaattttttctcatcaacattttatggatttcagtgtacaggtctttcatctcagtttcaggatacaaaatcaacatacaaaaatcagtaacatttttaaatgctaatagtgaactatttgaaaaaaaatcaagaaaacaatattttttacaatagctactaaaaaagtaagatatgtaggaataaatgtaaccaagaaagtgaaagatctctacactgaaagctacaaaacatttattacaaaaaattaacatttatttaaaaaattgaagaagagacaaaaaaatggaaagatatcatatatttatagattggaagacttaatattgttaaaatgtccatactatcaaaaagtgatctacagattcagtgcaatctctatcgaaatattaacactattcttcacagaaatagaaaagtcatcttaaaatttgtatggaaccacaaagacgctgaatagccaaagcaatcttgagtaaaaataaacaaagctgagggcatcacactatctgacttcaaaatatattgcaaagctatagtaaccaaaacagcaagacactggcataacaacagacatatagatcagggaaacagaataaagagctaaggacaaaatccacatagttatagtcaattgattttccacaaaggtgccaaaaacactccatgagggaaagaacagtctctgcattgtgattttagcttgcacttcctgaagggttaacaatattgaatctctttcgatatgcttatttgccttacttaaattattttggttgaagtatatgttgaaatcttgtctatcttttagaaggttttttttttattaataggttgtgcaagttctttattcttgccttttgattttctcaatgatcttttaattagaaaaagctttaaattttgatgaagcctgttttattatattttctttcttttatggcttatgccttttgtgtgctgtctgagaaatctagctcgaggtcacacaaattttctcctttttttttctagaagctttatggttttagctcttatatttaggtttatgattcattttgaattgcttttgtgtatggtatcaggaaaaggtgaaggtgatttttttcccaatagttatctagttattccagcattattaattgaaaagactcttatttcccccattgaattaccctggcacctttgccctggtatctaacctttacttgaaagttggttgaagcaatcacaaaagaccgctttactcaaggtagaaggacagctgaagaggagaaacgggacttcccttctgaagtggagacagtgtctaagactcgggcctccgttcacaaactgtcaggaatgattttgctaacaatgcagctttccatagcttgatatcatcctttaatatagcacaaatgtttttgcctttccccctccttctggggagccctcgatgccatagttagaagttgaagtaactctcaggaaaccaggtaggagaatttagaatctttagatatcaaagctagaaggaaccaataacctaataaagcacacactcttcatttgcaaaaaaagcaggaaagaggcccagaaaggttaagtgacttttccagcatcacacagcaatgaaatggcagagataggagcagattccaggtctcccaactgctccctgctgtctgacactcatcttccccacaatagcctccctcctagtgatttctctgaagatgagtggttcaccatgtattggaacttcacaaaatcatctgcaggaggcgtggcctcaagtggagcttgacgtagccctggctgtggaaagcaaggaggcaggaggctttagttagttagcagcaccaactcctcgccatagtggtcatctgaaatggctcagttgccttctaattgctcccaaactgttgcacatgccaggctttgggtgtttcacatcatccaggtttccccagcccaggacccttgctcattcatgtggctgctccatggccacaatctgttgcagacagaatgcatagcaggcatgcatgcatcacagcagtggtgggtatgtgttctgtccctgtcatgtttcttcagagtctgcagagcaagtgcaaggccaggctggaggagccacccaggatggcagccacccgctgaggtggtgcattggctgagatctcagcacgggaaacatcagccctgacagtgacatcacagatccttgtgttcaattcccttctttgcagatgggaaaactgagtcctagagaagataggctatgttcccaatgtcatacagcagagttgcatagcaagcactttgacagagagaaattcaactctgtacaccattgattctttgcttctgtttgatgagacttaaaatgaaaattatattttgtatttgcactccttattatatacttcacaattgcattggcatttatgcatccaaattactggatggtgttatctacataaatccatgtatactgtgctttatgaatgttttatagtacatgcagccaaaataacccttgaaatgtgattttcatcttacccagtgtcttagaacctcgttccctctgaaagatgtggctttaatgtggagctatttaattgggcggggaagaggggatcctgactcctagttaagcactctttccccagcaccaagctgccttgatcttccagtgaaatgtccaatttttgtcggaggttccccctccccaagacaaaaaaggggagtgcaggatggtggttttgccaggaagttagcgatgagggaaaatgcaagtagcaaatgtccatgaaatggagtttctcaccatctcaacaataagggtttaatttgcaaagtgccccccgacccccactactttccagtcagctacagcaaggcttcctggggctgagagcagcctgaaccctgtccctttaatgtggggtcctcctctgggctcttcctctctctgggaagtgactgtgcacagggaaagtgtaattggcaggctgtgacactgctgtctgcaagtgtctctctaagtggaacgcatttcagctttatctggtgatgtctgctacctgagaagggccctgggccatctcaaagggcttgtagcagctaattgtgcctgttaggaccagcaattagctggggatctctggacttcgaagctccaacacccaccagctttcccttcctttctctccctttcacttaactagcccagcctaatagaggcagtgaaggacaggcaggtgaggggcagacaggacaaggaaggtggaggctggcagggcctcatcctatgcccctctgagtcctgcactccacccctgctcaagagaacctgcgaaaagaaacaggcaccagctctgctctcatgctgtaaatacatcctctttattgcaggaccagggctagaagcttattaatcggtatcgggagtcatgctgcccgtttgtacagtttaagcgggagttggaagatgacaataaaaagctaattaggcgcaggtcataaaggagatcacacatgcatggtgtctgctggttactatgggcacacgatggtttcggtggaaacacgaggcagaacgtctgaaaattaagacaataaatcagtttcattgaataaaagccatgcatttacccattaattaaggataatggtatcctataagctttttgtgtaccacaggtaatttgttgtactttgccgtaataatatacgttgaagattaaaaattcagtataccttacaagtaatggatgcacacagctcttcctctgttctcagaagcagctaaaggttcatgcattagcacaatcccatattcaggctcacctgatctgcctttgtccagtgactcagactaattattaggcatgttctttctctggtggcttgcagtgagaggggagtgaccctccgtcccactgtgtctgctaatgtgccatttgggttttattttttagcagctatcacccatctcctttcttcacaaaactgtacccttatatttttgggggggatttcccccaagttttgcagtcttgaagggctgtcaatcaaggtgcccaaggcaggatgtaatcagagctcagccagtcaagctctgtgtcccaggactcagacgcaagcagagtaatgtaagggcagaggaaaacaaggtcctgggagctctatttaggatagagctgatcaacccagttgacaggatgatcaactaggttctgcctaggagatctctaagattcccaacagtcactcttcagggtaggcagaagaatgccctggggattaggaagacacccacttcctaatccccagaacctgtgaaaatggtacccgacatggaaaaagcaacttcacagttgtgattaaatgtgctgactttgagatgggtagataatactgggttttccaggaggaactcatgtaatcacgagtccttaaaaatggggaaccttggccagacgtggtggcttacgcctgcaatcccagcactttgggaggctgaggtgagaggatcgcttgaggccaggagatcaagaccagcctgggcaacctagtgagacaccgtctctacaaaaataaataaataaataaataaataaataaataaataaataaatagatagataaataaataattagttgggtgtggtagcacatgcctgtagtcccagctacttggtaggctgaggtgggagaatagcttgggcccaggaggtcaaggctgtagtgagccatgattgcaccactgcgctccagcctgggcaacagagtgagaccctaagaaataaaaaagaaagaaaagataaaaggcaaagaaaagaaaagaaggaaggaaggagaaggaaagaaggaaagagagaaagagaaagagaaaggaaaggaaaagaaaggacaggaaaggagaaaggaaaggaaaggaaaggaaaggaaaggaaaggaaaggaaaggaaaggaaaggaaaggaaggaaagggggagggagggaagggagggagggagggagaaagggaggaaggaaggaaggaaagaaggaaggaatcctttttcagctgagtcagagaaaaagatgacaataggagaagagtcagagtcgggatatgagaaggacttgaccaccatgactgaccatttttgaagatggaggaagatgaccaccaaccacaggatgcgagcagccactaggagctgaaaaaggcaatgagatgcattatccactggaacccacagggaggagagcagcgctgctgacactgcgatggtagcccaacgacacctgtgccagacttctgatctatgaaactgtaagatgatagatttctattgtttgagccattcactttgaggaatttgttacagcagcaagagaacgttcacactgttgaggctctgccctcagacttagccagattgtgtgtctgctgcttgtaaccagctctacctatcagaactggagaaagcaactttgccttctgttacctcaagtaaatttggatgggccataggtataattcacagctcagggtaggctggctggcctggcaatgaaacagagctggaaatgaaaggtgctgcctattctgtcttcccatgtttccagtgccaaaccacaccccaaaacatccacggacacgttgatgtgggaaagacctcttggtctccccttccctctctccttcctctctctcttcctcttccctcttccctcttcttttttgctctcttcatttttactctttcattttcagaacatgaatgcctggatctcccaaccattgccacaccaaaactccattcactggttctgggaaggcacatggatgtatgatttttataaaataagctcacctaagaattctgatgcacatgagattcaggtgcctgggaagggccaatggcctaatttaaagccaatatttccagataacataatgaagacttagaggatgtaagtgtcctgcccaaggtcacacagctggccagatgcagagaacaccaggttcagtgctctttccatgaccaggggctgctgccaactcgaggacattagagaattcagtgaccctctgacatctctcagtttagaaacctttctcttttaattggagcatttcatccatttacattttaatgtaattatgttatgttggggctttaatctaccatcctcccaggtgcatttgattcgtcttcttacccactcagtgccccttttagttttggggggttggttatttctttagttattccagtgtttcttctgtccttcagaagatatacactcagttactcttttctgcttaccttagtgccatggttgtccactggggcaatttcagcagatgtttgacaatgtctacagacagttttggatgtcaccatggcagtgggtggaggggagggtgttgctagtggtgactagtaactggaggccagaaatgctgctagacttcctatagtacacaggaaagtcccttccaataaggagtgtatggccccaaatctcaacagcactgaggctgagaaactctgccctagagatgacaacttttatctttgactcatgaaaatttaatgtcaatttggtaactttacaagtttcccagaaagtgtaatagaatactgcaactcctttgcccaatttcaactcatgtgctatcagtgttgggcattctccatatattttaaaccccacaagatattattgttatttttgatatagtcagttcttcatttagactttcccagagctctgcatttcttcctggatctctgaccttccatatggaatccttttccttctgcctaaagaactccctttatctcctggagtgttgatctatctgctggtaagaagttctttcagttttcgtttgtctgaaaatgtcttcattgaacttttttgttgtctttatgattactagtatgtttattgatggctacatgtagaaaacaccacggccttcacaatgaaattgttctgcacaaccacaatactattatcacacttaagaaaattaaaattgattaaataatatctaaaatagagtgaatattcaaatttccacacttgtccctgatacattatgatagctggatcctcttataaggattcacctgattgtcaggtcttttgtctttttcgaaagtctagaatacactttacttattttttaaattattgttattccgtttgcagtttttggaagaacgaagctagttgttcagtaaaacatctcacatgctgtatttttctgattatttctccagatttgatttagatttagtacttctggcaggaatactacatagggaatgtgcatacttcttgttgtcacatgtcaggaggcacataatgtcaggttgttctactagtgagggtcacttggttaaggtggttactgccaggtctcttccatgcaaatatatttctttggtggctagcatgctaataagcaagtatattttgtgatcagtaaaatgccttacactgtgagactgtgacatgtcaccatctccaacatttcacccagggtttttagcacctattcatgattcttgcctgaatcaattattgcactggggattacaaagtggtgattttctcattttatactcccttctatattgagtagtggttaatgttttttggaaaagaagagttttgagcactgtcttgctttttggaaaaacaatgtatctcaagcttattttgtatttcccctgtcccaggtgtgcagtcacttttcaaaggagccttggggttctttaatgggaaatggtatttaggagccaagatctgggctgcaggtgtgctcctcatccaccagctgttattgtctttagcccactttaatggcaggaattaggaaatacattttccccttaaaattctgaattcatattgataacctccaattcaataggaaattgattcatatttgcactttccttttaccacactgagaaccctactttgcagcaacatgtttacactttttctgtaaaatcctgaatttatactgaaaatctccagttcagtaggaaagtgattcatatttgcattttcccaaccactttgcagcaacatgcttatacattttccctattctagaatgcacacaatagtttcagaattgcacacgaagacaactgccattaacaaacctcccaaacaaaggtcaagattcctttgcagaattaaaagtatatgtatttttaactttagaatatagccttcctgtaggaatgtgtgattagagtaatatgttcaaaagttacttgaattaattttttatttctatggttatcagtttgaagtacaattttattaattcgcatcttcacatttcctttttatccctttgatataattttacttttgcatacataaaacatttacagtttcaaaattcaaagctatataaaaagataaactcagaggagtctcacacataaatttcacccaatcttactcctacccatcaccagaggaaaatctttttattattttccggtatattttttctgtgttcctttgtgccaaataagtaaggatgtatatatgtaagtatacagaatatatatgtatacatatgcacgagtatgtatacatatatgttatttcccagtggtttttaataaaagtatgatgtaatttatatagcttcctttttgccattgataaaatattcaggaaattactccattattccattatgctttatacaggtattcctcatactttgtttgagttgaatattgttttattatgtggatacaacaaagttcattcgaacaccttttctatgaataaacacttgggttgttactgctttgtattacttcagggtaaattccttagtggacttgcattgccttttttttttctttaaggttttgtgggtttattttgttttcctattttcatctgaatattaaaatccttgtccagatgtaggaaaaaaatttgttggtatattcactgtgattactacaagtgtatgtaacttagccagatgatatctttatgatgttattttttccccaagaacaaggaatttatttccacttctttgggtgtaatttcaggtttctcaatgtgtttttggttttcttcatctaggttttgcacatttcctattacatttattcatataaatttatctttttttgttattttaagtggatttttctctttcattacatcttctaaataattattatttggatatttaaaggctattgtcttttatgataattttacatcattctaccttattgaattttgtatatttgtgtgtatctttgtttgtgtattggtttaacttctatttattagagtttccaggtacactggcatatcatatacagagaaaaagttttacttcttttccaagctttatgcctcttcttgttcttaaagtattagccaatcaaagcagacaagagaaaaatgtacattagctatagcagagatgtttggaatcaccgtctttttctggagcttgatagaaatacttctagtgcttatccattaaataaaatactactttaaaaactaaagcataaatactttatcattaggaaagtatttataaattctgattctattgagtatttcctgatgaaaacaggaaacattaaagtattcatttaaatatttcaataaagcatttataaaaatttcaaactttcagaatatttttaatacaatggtgtttctttacccagactcaccaattgttgttaacagtttgctacatttgctagtgtgtattttctaaagaaaagaacattttgtgacataaccacagcacaactaaaaagtcagaaaatttaatattgatataatacattgtttaatttatagtctaaattccaattttaccaaatgtttccataatgtcctctgtaggagtttttactcagttcagtatttaactctggacaattacctaaaatttagttgtgttatctctttcattttctttaattttggacattaacttattacttaattgtctttcatgacattgacacttttgaagagtaaaaggacaattattttgtgaaatatccctctctttggtgaatgcttcccagtgattggatctaggtgactttttggactgaaaaactacagaagttacttgagcttctttgcagtgcattgcttaaggaagcatttggtgtcagttcgctgcattattggctaactttgttcaccagccttctccactgtaaaattactatttttccttttgtaattactaaacactttctgggatgaattttggctgaattattttggactatgtaaatatcttattcccataaaatctttcacccatggtttccaatatccattgatttcatcaattatccttatctaataaactgtgcattttttaaattgtgcttttctaattcgatctttgttcagtgtttaatagctggcattcttcactatagaagaatgttactctgcattttaattttatttttaatgtattgaattataatccatctccttaactattatttatgctatttttttcctatatctggacaatgggagtccctgcatgctgctttttcttgttgtagttttgacaaatcctcatccttctttgagtactttcacccttttagttattttcatgctatgtaatttttccattcttttactttcaatttatctatgactttttatatttaaagtgaatctgttatatcatttgatcttgcttttattagtcctttctctgccttttaattgagttgtttagttcttcatacttaatgtaattatttaagctaatttagatgttccattttactatttgttgttggtttttgttcttttggtcttctcttttggattttttttatttcggtcttttctacctttggtttttatcttcttttcctgccatcttttggcttagttgaatatattttatggttttattccaatttattggttagtttttagctatactttattgatttatttttactaggtgttaaaggctttaatatatacagccttaatttttcagtctacttaaagttaggcccatttatccccctctgtccctgctctgtttgttgtgctctagttgttttatatacatatacatacattacagttacataatttaaaaatctccagatataatgccatatgttttgcttcaaatagccttaaaggttgtgtttttaaaaaaataaaaagtaaaaagtctttaatattttctatatttttaccagttataggattctatttattcctaggtatctaggtttccatctagtattatttacttttgacctggagaatttccttaagcatttttatactattgtctattagcaaaaattctcttagttttaatatatctggaaatgtctttatttcagcttcatgcctgaagaatattttcactgtataaagaattctgtattgaaagtttttctttcaacatagtcatgtgttgcttaataacagggctatttctgagaaatgtgttgttaggttaaatgtatcactgtgtgaacatcatagtgtgtatttacacaaatctagatggtatagcctactacacacctaggctgtatgatatagcctattgctcctaggctataaacctgtacagcatgctactttgttgagtaataaaagcaatcatctttcattgaccaagacatcattatgcattgcatgactgtattttaaagatggcattctactgacttctgacttccagcacttctgaccagaagtcaacagttctttacattattgtttcctttaatataatggctgtttttctctgatttcaatattttctccttttaaagctttttaaaaatgatacataacatttgtatgtatttgtaaggtacatgtggttttttgatacatgtaggatgtgtaatgatcaagtcagagtatttaggatatccaacaccgcaaacatttattctttccattgggaacatttcaaatcttctgttttagatattttgaagtacacattatataactgtagttaccctactgtgctatcaaacgttagaactcattcgttctatgtaactgtatggttgtgctcattaacctctctctcttcatcactcccctcaaacacacacacaacctttccagcctctgatcattctactccctaccaccattgaaacaactgatttttcctttatattagatctttattagtttgaacaagatatgcctagatggaataatttttctctctctctctctctctctctttctccttccgtctgtctatccctccctctctccctccctccctcctttccttccttccttccttcctttcttctttcctccctccctccctcttttgcttcttccttccttctttcctccctccctccctcttttgctccttccttccttctttctttcctccctctttccctcttttgctccttccttccttctttctttcctccctctttccctcttttgctccttccttccttcctccctccctccctccctccctccttcctttcttccttctttccctccctcttttgcccaggctggagtgcagtggtgtgatcacagctcactgcagcctcaacctcctggtctcaagtgatcccctacctcagcctcttgagtagctgatgccacaggcatgcacaccaccatatcagcctaatttttgtatttctcatagagatagggtttcaccatgttacccagactggtctggaactcctgagctcaatcaatctgcccccacttaaccttccaaaatgctgcgattacaggagtgaggccccatgcccagatgaaatttcctttgcattgcttttcttggcatttgttgaacttctagaatctataaatctgtgtctttcaccaaatttggataaatttgaggcatcattcatttcttcaagtatattttctgttccactttccctgtcttttcattctgggattccaatgacatttatggtagaaatgttggtattgtctcactgtccttgtcctttaaacaattactattgttctgtcttcaagttcagggactgatttatatgtcatcactaacctattgctaatcaaagcctgtaattttttaaaaattttatccagactatgggtctatttatgagaaaattagtgcaaaggagctactttaccattactgaaagcagaactcgcctgaaaaaaaaatgatactaatgcattacttttaattttcactttcattccctaaggatattttaatgggtatagacatcttgtttggcagttattttctcatagcacacatacacacaaaacaaaaatttgttttctggcttactttttttttaattcagaaagtatttctcaattttgttgctgctcctttgaaggtaactttgttttacttggctcttgaaggattttgtgttttggtttattgtttggttttatttttatatgcataaatatgagtctattttttaatttatcttctttggcatttcttaggctttttggatctgtacttgatggcttttgtaaattctagagaattctcagtcttatctactgaaatacctctgccacattctctcctctccttttgtaactgtaattaaatgtatattagacttctgactgtattatctatatttcttaccgccattcattcctttctttcttattatttttctatcacttcctattattttttctccatcctgtatatttcttttgatatgttctctttttgctaatttgctttttagctacatgatatttgctataaaactcatctactgatttcttaatttcagctacatttattgttccagaatgtcctcttaaatctgccatatcgttactggaaagttctgttctctgtaaaaaaattcaatattgtcttttatttttttggtttgaacatagaaagaataattatttagcataattattttaaaggctgtgtcttacgttttccttgtaagcccctgtgagtctgtttctaatgtcttttttctgctagtttcctttcattttgtttggccaagcagcaaaacacaatctcttatctcttttctatgtatggcatcttatggagcaatatttttgatcctatgtgattctctcatcaactgtattattatacccattctgaaaatgagaaacctgaggcttaaagatgttgagtagcttctcaaagccacatggatataaggagatccccggaattcagaaccggagctatttgcatttaaagctaaaggctgagcttttaacccttggctacctggaaaaagttgggctgatgagatcccatttttcccaagtggcagagccaaaatcaaaccaaaccattgttatggatggatatggtggtcaatgacagttctacattctttttcaagttctctatgcagacagattttgcagcagtgcactgactgtgagctgcttttgatacgtgatctggggctggacagctggctccttgagtgatgaagttgaaataaggaaatgaataattttatgctcattttagagaggcttctctgaggtttggggttaggcagtggtaaggcacctatcactttctgccaaggccaaaatcagccggtaacagccagcataactgaccccagtgtttgctttcttgccagacactccaaacctctctgtataggctattgtcaaaacaacagcagcaacagtagcaaaaaagagataacatttattgaatacactgtgtgcttgtcattgttctagaactttgtatttattgatgcataaacatcactgtaacaatgctatgaagtacattgtattaatatttggattttgcagatgaagaaactaatgcatagagaggttatttaacttgcccaaagtcatctgaaatagcacaactatttagagtaagacacagagctcacattcagggcccacgtcagagtccacactcttaactaccagttaattacattgttaattcattcccttttgtgttggtggtcctatggtgggggagaaattgtgtaactatcctagaaataaaatgcaggatgggaatgggagtctgaaagaagtcaagtcctggatcaatggagagccaagagccaggagctgaggaggggtcagtggtgagtgaaaagagtcagtggtgagtgaaaagctccagactgcccaacacttggtgcagtggctcacgcctgtaatcccagtactttgctcacgcctgtaatcccagtactttgagactagcccaggcaacatagtgagaccctcctctccacaaaaataattaaaaattagctgcacatagtaacatgtgcctgtgaccccagttacttgggaggctgaggtgacaagatcctttgagctcaggggtttgagatcagcttgggcaacacagcaagactctgtctctacaaaatattagaaattagctgggcatgatggcgtgcacctggagtcttagctactcgagagactgagctgggaggatcacgtgagcctgtcagggtcgcttgagcctgggaggtcgaggctgctgtgagctgtgattgcattaccacactccagcctgggtgacagagcaagaacttgtctcaaaaaataaaaaaaatgttaaaactacacagtcctaggtggtggggtatagaggtgagtgtactgccatagaagattgcaagaagaggacatggaaataactaccagcaatggtcgtgcctgaaaagctgtggatccggctgcatcctggaggctagccagagtttctcttattttttgcttttttgttttttattttttgatgacgaagtttcattctgatgtccaggctaaagtgcagtggtatgatcaaggctcactgcagcctggacctcaccccgctggagtctgaatttctacttagctactcccaataaaaatgtgtatgtctttggaaagctgccttttacaacagattcttcactgatttttttaataataaattaaggctttcgctcagaatctcttatgcaacaattcttccatatatgcatagatgtgtcagaactgactcaagcgttttattggtgaagaatctcagaagctgggcaattttcacctttatgaagtatgctactttattatttatttatggcttttctcctgatttcccacttgctttccttctttgtctagttggtggtgggcctacccactgctacgggctcctttcagctgataattgcccatcagtttttacttacactgagtggtggctctggaattgaggggcccagctgggttcctaggtaatagactgtggaggttcatgccctgagctgggcttccccacctaggcattcaggctgagcccagccagggccaacagtctagtgggtacggagcctgaacacagtgcctgtgctcagagccagcagatggctagatctctcaggaaatgccaccctacttggggtcgcctggcctccttggctgtgtggggctggctctcctttcttgatggcacctaggaaattccagcttccccaggctctaaagtccctgcccctgctagctctagaatacagaaattcacataaaagctagattcagtcccagcctaagctctcaggcttctcactctgccagacactcctgatgtcagatgaggccatgtggggacatctaggcttgttcaaggccccttgccaggcttcacataaagcccacccttgtgtgggtgaggcatgggcgtggatgatctgggtagtgagtggggagaaaagcagtgaggtttgggggaggagcactgggctgggaatcgggaagttcaagctcggcttgcctctgcattaactctcgaacttctcaggtgccgaactgctggaaccaaggaggtcctcagatctggccacatgagaaagcagcaaggtgcaggaaaacagccacagacattacagtccaccagaccagggtccgcgaccatttgtgcctgtcactcactcatggcttcggccaaatcatttcagtgtcttcatatataaaatggaactggtgatgcctgacatgctcctcaggtgcccaaccaggaggccctaagacaacatttctctaagcttcaagcaagatcttgacacagacatggactgccatgcattactgggaatgatgaccacatcaaaggtgcaaggatgtggattaagtgtcagctgtagctctcattcaggcttcacagccaccgtgtggggcaggtgggaccacacctggcaggtttcacatgggaactccgagagcatattaggttatgggcaccattagaactgaaaggattattttcaagtcccatttctagcacacctgtagggtctcaatgcgtgtttgttgagtgaaagaaggaacttccccaccccactcatcctatattctactgtgtcaactattcacccttggagggcaaagagtggggcaactcctgggccttcattctgcagtcacttttcatggggagagtgccccctttctgacctcctgagattccagtcgctggcatgaaaacccatccttggctgccttattccctgacaggtggggagtgatgccttttgccattcatgaaaaaaaaatgtaaatggtgacaaaagctatttttataatgtttttatctattccatgactgacatcaataacacataacagtttcattgacattgtatcgcatccaatgggcccagtgacctgattcaatgtcagtagaaaagcctcgtacatcatccccgtggctgaattgcaacagatccattaccaatgcttcaacctcagaagtgtcccggaaccgacgccaagtccatttcaagtcctccttcccaatcttcctgttttgtaactgccttagctatcttaccatggactcagtcaccctttggctcacccccttaagttgttccatccctgaacttaccgagtttcgagggtcaggacaggtctgtgcatttggtactatgtgtcacatagtaggagctcaatttatgaataaatgagagggggaatggcggggaggaggaaagaatggaatgtgggtctacacctcagttacagcgtgagtgcttttgcatggctctgtgttccttgcagcactaggactcagctagaacatccataacaactcagggtccttggaggagtaaaacttattctcattgcaccagctggctctgctgggactgaatgtaatcagaaaagagagaaggctttaggacatttttgtaaaatgaaaacctactgtgggagagaactccctgccccagacttcagccccaggacctggaagccagccagcacctgaggaagaggaggccgcccagccaggtgcctgtgctggactcacagagagaagcctcccagccagacccaccttggttctcctcatcttctcagctacacaaaatgggaacggacattgactctgcaatcttattacatgggtttaagagagccctcactaatatagcaatatatgtgtcatttgtctcactagtaaggctgtttagtagtcaaaactgtagaaaattgaatatacacttactgtataaaaatgatatgcttggttagtgatagtttaaaagaaataagtacatctatcatagaagaactggctgtcagctctttatatgtaagaaaaatattgaacacaaatgtgataaatgttgggcactattttacaaaagttatccaacgaagttggtttacagtaagttcttcccagcaaagaggaagataaaaggaaaagagagagacaatggatagaagaaaacaagacaaagggggtggggaacaaggagagagaccgagggaaagaagagctccaaagtgttgagagaaaaggccccaagcactgtcctcactctggcatcgcgtagcccttgcctgctcctgcatccctctatttgggaaaagtttcctccccaaagggagctcagatggggaggggtaaatccagtgcagaagattccacgtcatggagaatggctgatgaacactcggtagttccatccccaggccaccagaaaaggcagttggaatggatcttgctatggtccagaggcaaaagttgggtagactaagagaagaaagttgaactactgatcaacagtagtacttggggagtggctccataaataaggaagttccaggtgggaagggaattctaaaataatgtgaggagctcccagtggggtgttagggtgctaagggggctggttgtgtgacctctaagctgggccctgggatggaggtgggcccctgtctggcgatggagcagtgaggaggtcaacaagtccactggggtcagctccgaggagcccggggacagggagtgtggtagaggaggacaaagaggacagaggaggtgggaggcccattcctggaggacatgggacttgactgagctttgagcctgagtgggtagagagttcttccagtcagaggagagtccaaagcagagggtgtccatctccatttggttggaacagagaaagggtgcatttgagggcaggggtaacagagataagaccagcaagagctagctgggagcgtctatcttggcatgcaagaagggcttgaaatcaaattcaaatggactcctttgagatccggtagatagagggcagccacagagggtgtccaagccaggcagagtgagagtgggagtgtgacagagcggggaaactcatgatgagccggagtgcccttcctccccagggctttgatctccagagatcaaagtgcctccaccagcatgccctcctctcccatgtgcgccctgatacacctctgcactgtctgggttccccatgagggcagagcttcaaagtgggacccaggggctgaggggagattcagaagtactcaggagaggaaggtgcagggatgggcctgtggaggctcaggaaggtgaatgtcttctctgcccagctcgagcttaggagaaagtgggaagtgagctgagagttctgtgcctcgctttacctcttccctattttcccagtcttaccttcattccattcttccttccttctcgctctcttccttcctttcacctttttcaatttgagccaacactggcctagtactgactacctgctaagagttgttagaaacaacttatggatatcatctcatttaatcctcataacaaccctgtatgtggcaagtgctgttactgagaaatcaatgggctccctgcttaaggcacatagattggatcttgcaatagggtgatgccaggaggcatgatccgattggatcctgccatggggtgatgccaggactcagtatgattgagtcctgatcctgccatgcatgtccacatcttaattcagtccccactccttgggagtgcttacactccctcctgcttgcacacttagctcatgtgggcatgcagaggttatgtgaccttcaacatgtgggtccatggcagctgaacaacaactcacgactttgttacataaaagttgaaccagatgggtgtggtggctcaagcctgtaatcccagcactttgagaggccgaggtgagaggatcacttgagccacggttgaggctgcagtgagctgtgactgtgccactgcactccagcctaggcaacaggagtgagatcctatctcaaaaaaataaaaataaaaaagttgaatcagattggtctaaagcagttacagtactacaattatcccctttttatagattagaaaactgaggctggggggaagttaagcattgttccaagtcaccccgtgagtaagtggcagagctgggatttgaacccagtctgtctggttccactgtctgaactttgctgcctctgaataattctcctccccaaagctgcccccatcaaaaaacaaaacaaaacacacaaacaaaaaaaacaccagtaatgttccggagagaccccaggtgttcagcaagagtattttgactctgtcttttcctttctggagcttgtctttattggagctgggaaggtggttccagggatgagggtggtagggtgggatacaggaagctcccctcagtgaaaggcaggaagactaagccttcacccagctctggcagtcccaagctttatacctctgggcttatattcactgttcccccttctgagtatccaatgtccatcataccactctgtatgcccctgcacacctatagcttagcttccacttataagtgagaagatgcaatctttgcttttcttttcctgagttacttcacttaggataatggcccccagctcctttgaagttgctgcaaaagacattatgtcgttcttttttatggctgagtagtattccatggtgtatatatgtcacatttactttgtttgctcatcagttgatggacatttaggttgattcagtatctttgaattgtgaattgtacttcaataaacatatgtgcagaagtctttttgatgtaatgaattattttcctttgggtatccagtagtaggattgctggatggaatggcagatctacttagagtctttgagaaatctccatgctgtgttccatagtggttgtactaatttacatccccaccagcagtggatacgcttggggatgtgttttttaaggaagggatgacaccatcattactgatgtatggtgagtcccagtgtgggtagagccctgggccaggcctggaggaggaaaaggaggaaaggtgaggggagtcttgatttcctatgagttcatatttaggcagcccagccactctaaaagtctgagggttcttatagtatcagagctaggaaatctggtagtcacaaagttgacttccatcttttcagctggggagacagaggcatgtgacaggttcgtcagtgccagggccactttgggtcagcagtggcagggatttctacatgtcaatgcacactcaacattcaattcacactcagctcattcctcaacgaggcttctcctccatgggcaggctccctgcatccttcctggtcaagccctctctttcttcatcttcagtgctgaggggaggaaagaggaggagaagagaaggggtgattgccaaaaccctggagcgcacccaaaccaaacggaggagattctatcttcactttgcacaagggatggaagaagctgagagaagggcccagtgtggggtaagcagtggcccaggcagagtctccatgcaggatattcacatcacccttgggacagcccggacagcaaacctgactttagtgcatcagcgacattctcctgggccctgcaaccagcgcatccttactggagctctggctttcttgcacaaatactgatgcctcctgagatgtcctcccagctcactgccccttccatcattgcccacccctcctccacacagggaagttgatgtgtggagtgggactcattattaagttgaacccttagcctttttcttggagaagggtcctgcccaccactggccctgctatatgtgtcccttctctggtccatcttgagccacacagaccccagaccactgtcctgaggtccttccttgtctgtgtggctgacttcccatctgggatcattctcacctccatcctcccaccccacaggtgttccagaactgtcctcttcctcctcctctcttatcctgtcttatttgtaggagttctttatatattccagttaataaccctctgtcagtttgatgtctattttctacacagtctactattttaattttgcctataattttttgtggttcagagttttacaattgtgtttcacttatttattcaacacatatttattgaatgtctaatgatgtcaaattatcagccttttctttgtctttttacttcttgtttgaaaagaactttcttatcttcttctctgattttatagtagttttttatgtttagattctgtaatgcctacatttatttttttcaaatggtatgagataggaatttcaatatatatttttaaatgtatactatatttcataggccctcctgtctctagtctttactaagttctcatatggacacagatctatttctgaattcacttttctgttctactactctgtctattctagtgctgatacaacttgctttttatcaaaatgggattaaaacatattttggacaaacactccttctcttttatctttaaattttttacagtttcttggctcttcttgcacagaaagtcttctatttaaatatcagaatcagattgtcaatttccatgaagaattttgtttgtcttttgataaattctaggttgaattcatgaatttattttgggaaaaggggtagattttccatgctgaagcctccctttcatgaatacagtttctgtctttgttactccagtttttggcccacctcctcagggtcttcctgggcaggaccactttcctcagatgtctgtatttctaaatctttgccttcctactaactatactgtctcatttcccactattgttattcccgggcaatggaaagaatgcaagcacccaaaaaaatctaatggcccatttatagttacaaaacaaatgacaaagccaagaccagaactcaggtcccttgacattcacccacctcatggccaggccccaaccactgaactaccacacccctgtagctactacctcctccagtgcttcatctccatccctcacacctccctgctacccagccttacaaaatacagtactttaagctactgtatatgcagatagctgcccgtgaggtcaggacatttatttgaatgcttacttagtgcttactgacagccaagtccaatgttatatgctggatataccaaaatgaataagacaagacccctggcctaagggtgttcacagggaattagatgtgtgcaaacaagttacaggtgtcacaagtgtgagaggatgtcatagtctgtttgcactgttataaaaccatctcattaatgtgtatcttataaaccacagaaatttatttctcacagttctggagtctgggaaatataagattttatttttttatttttatttttatttcattttttttgagatggagtctcactcttttgcccaggctggagtgcagtggcatgatcttggcttaatgcaagctccacctcccaggttcgtgccattctcctgcctcagcttcccaagtagctgggactacaggagcccatcaccatgcccagctaatttttttgtatttttagtagagatggggtttcactatggtagccaggatggtctcgatctcctgaccttgtgatcagcccacctcagcctcccaaagtgctaggattacaggcatgagccaccgtgtctgaccaggaaatataagattaagatactggcagatctggtgtccggtgagggcccacattctggttcatctatagtgccttcttgctgcatcctatatggtggaaggggcgaggcagatctctgggcacaaatcttattcatgagaactctgccctcatagtctgattacttcacaaaggccccacctccaaatatcattacattgtcaactagatttctgctattaatttgggggtgacacagatgttctgattatagcagaggatgtgtctgggtatgcctgatgaactggtgagtgaacagctagacgttgatttgcaatgtgggttttgtcgggggtggagctgtttacaagggagccaggaaggaatcaggatatactaccagatactggctgagctgtacccactgtttcttgtggacttatagcttagccctgtagagagaggtgctgttggcagagcctaagggaaggctcttttgcagccttggagacacacaggacccaaggaaccctgcttgatcatcagtgccaagcacaaaccagagtaggtgaactcagaagaactttgggcagtgaagagcccagggaacatggccactgtgtgaccctatcagccatgcccaggctgagactggtataccaccagcacctgtcttctccggaaggctctgagcaaccgcagcaaagggagaccccactccgggggatatcaatgtcctcagaggcaaacagactcaggtttgaatcccagatccaacaatgaaagcttgtggtcctcattacagtaccaaatggtagagtggacaagaagaagcaaattccttgattcctatgggaaggggattcaaacagtagctcagtggacatctgactctgaaacccgcatgtctgccttgtgtgaggtgtccagcgaccttagcgacagattatttgccactttccacgtgacctggttccaacagagggtacaaccctggggtggttgtgttgtttttctcggaatcactggtttaaagcaaactttaggcaaacttgactggcacaacttatgtcatgtctctgtagcactggtactttgaattacttaatgttatttaaattgatatttaatttatggtaagagggaacttgtggatcagataaaataaaggcaagggtaaagggtaaaatagacacatgacctcagctacaaagttagaggacaggaacctacaggacctggatggccagaatgggtcccagagaagagactgagatagtagagggagaagtagagaggtggccaggactggaaagcagcagggaatgtgcagtcagccttggaggataatggggtgcaacctgagagtgaggactggggactgaggctggagcagaagatcagagggaggtgtgaggagtagtgggaagtcgatggggcacaggatcggaccctgagataaaggggatgcaggttagggaatgggagcccagccagtgttgaaacccatgggaaggctctggcagggttttaggaaggaagactaagggtgattgtgggttaatgagaaagatcaaaggaaatcaatacgttgaagcaaagtgggtccaggcctgtgtcagcagacagaccttcctagagaaaaacgagaccggctggaagctccgggttatggtctggagacctgtctagtcaaaccttgatcaaggcagaggcctcacagactcagacagagagaatgagaactcctgcatagagtcaaagccagccatggcttttcattcaatttacatgtacctgcactgtagggcactcatgaaaagtgattgggagcaaattgagaaagatgaaagaacagagttctttctgcaaagtacaatcactgtgcaggattcctttccacattcaggctctgagagggtggaagtccaagatcaaagtatttgcagggatggtttcttcttaggcctctcaccttggttttcagatggctacattctcactgtgtcctcacatggtcatctttccatctgtgttatctatgtcctgttctcctcttttttataaggacactgatgctattagattgaggtacactcaaatggcctcatttttaacttaattacccctttaaaatccctatctccaaatacaatcacatttttgaggtactaaggattagggcttcaatatagaagtttgggggtacacaattcatcacataacaaggaccaggtgggatttattccaggtttgcaactttggcatgctacataaaaatcagttaacataatctaccatactaacaggctaaagaagaaaaagcatatgataatatcaattgttgcacaaaaagcatttgacaagcttgcacagccattaatgataaaaaactttcaaaaaactgggaatagagaaaaactttcttttttaagacagcgtctcactgtcgcccaggctggagtgcaggtggagtggcgtaatcatggctcactgcagcctcaacttcctgtattcaagtgatcctcccacttgaatagctgagactaaaggcatacaccactgcaactggctaattttttgtattttttgtagagacgggtctcagtatgtcccccaagctggtctccaactccttgcctcaagcaatcctcccacctaggctttccaaagtgctgggattacaggagtgagccactgcacctggctgaaaaacttccttgacataataaagaacacacacacaccctacagttaatatcgaggcaagagtatccactcacatgacacctattcaacattgtagtggaagttctagctagtgaaatagacaagaaaaaaacttactgactggaaaagaagaaataaaattgtctctatttacaaataacatgattttctatatagaaaatctcaaaacagtcctccatctaaaaagaaacaaaaatcatacacctagagctaaaatgtcggccatgtttacaagatcaatacgcaaaaataaaatatatttctatataccagccatgaacaactggaaaccaaaatatttttaaaaatcatttacaattattaaaaacatacctaggtttaaatctaacaaattatgtatagaatcttttattgaaaattataaaatgtggattaaataaaaaaggcctaactaaatggagggatatagcatgtttatgggttggaaggttaaacatagtaaagatggcaattttctttaaactgatctttagatttaatacaatttcgatcaaaatctcagcaaggtttattgcagacaaaggcaatcttattctaaagtttatatggaaagaaaagggatctgaacaaatgatctaaaacaactttgaaaagaagtataaaataaaaagaaccagtctaaccaatgttaagggttactatgtagctatagtaatcaaaatagtctggttttggtatggggatagacacatgggtcaataaaacagaaatagaaccctgaaatagtttaaaatatgcccaaatgatttcaacaaggtgtaaaaacaattcagtggacaaagggatagcattttcaacaaatagtaacggtgcaattggacatccataggtaagaaagtaagccttcatctaaatctcacaccttatagaaattcagaccaaaatggatcacagacttaagtgcaaagctttatctattttagaataggaggaaatctttaggacctaggactaggcaaaagtttttagacttgacacacacaaacacacacacacacacacacaagcacattttatgaaaggaaaaattgatacattagacctcatctaagttaaaataacttttgctattaaaaaattgtaaagatgaacaaactgagggaaagcattagcaagtcacatatccaacaaaggcctcgtatcaagaatgtataaggaagtcttaaaagtcaatagttaagaaaatgaacaatccaatttgaacatgggcaaaaaaacatgaacagacatttcactgaagaggacatacagatggcaaaaagaaaagaacatgaaaagacattcaacataattagctatggaagtaattcaagttaaaaccacaatgagaaaaactcacataacatgcagaagagaaggctgtgtaaaggcagaggcagagaccggagtaagatccatctcgaagacaagaaatgccaaggacggccatctggcaaccaccagaggccaggcgagaggcatggaggattccttcaccctgagccttcagagagagcatggcgctgctgacatcaatttgggacttctagtcttctgagctactgtgggcaataaatttctgctgtgttacaaaattacaaaaacacaatgatatctcactactcacctatcagaatgggtaaataaagaatcttgattttaacatatgctgctcaggatccagacaacccagaccgctcatcctctgttggtgggaatgtaaaatgctacaatcactctgaaaaacagtggggtgtgtcctataaaactaagcacacacttactatacagcccagcaattatactcttggacatttatcccagagaaatgaaaaatctatgtttacataaacacgtttatgtgaatgtttatagcagctttatttgttataggcaaaaactggaaacaacctaaatgtatatgtatgtgtatgtatatgcatatataaacgtgtatatataaggtttctttttgagataattttttttactcaatataattcttttatacaccctccattttgttatttatatcaatagttcattcacttttattgtgcactattctgtggtatggatgtaaaccggtttgtatggttaaactagttcgtttaaccatttgcctctgaagggcatttaggttgtttccagtttttgcctataacaaataaagctgctataaacattcacataaaggtttttatgtaaacatagatttttcatttctctgggataaatgtgcaagagtataattgctgggctgtatagtaagtgcatgcttagttttataggacacgcccaactgttttccagagtgattataccattttatattcccatcagcagtggatgagggatccggattgtctgcatatttatatatcaaatatatatatttgaaataacaaaagtacagagctcaaggatagaatagtagagttagtgataggacaggagtggatatagctgtaaagttctagcacaagaaaacctgtagtaatgaaacagttctttatctacattatggtggtggttacaggaatccacatatctgacaaaattgcacagaactacacacacagacacacacacacacacacacataagtaaataaataagcacatgcaaaactcataaaacccaaataatctctgtggattatatcaatatcaatttactgatttgttactgtattgtacttacgcaagatgttactgttggggaaaactgggcaaagggcatatggagcttttctcataagtttttcttcaacttcctgtgaatctgtaattaattaaaaataaaacatttttaagaaattcaagaggagacttagagaagaactttgtgtggataggaggggttccggcagagttatgggttggtgagtcaccagtatttgtttaaaccaaggatttgggtaaaatcactccaagagtttgaagaaagtttccacctcagcatttaaacatctggtggggtaggccctatggagtggagagagatgtaagggaaactctacacaagggaaagacctggctatgagagaagaaagtatctcaattaggaaggagtgtggactgagtggatgcaagcgagaagttcagtaagttggagtgaagtgtctgtggtgtttaatgatcttgacgagctgtgtcagggttgtgaaatgatgggatgatggagtgattgagggaaaaatggagtggtgagcacaggatgtggaaaaaaaaaatcgaagatctctagaaactggtcctttgccaagccttggtgttgggcgagggggacagctggaccatttattagcttgtttactctattactagaataaacctagcaatattctaggtttgaggacctgagtgatcctggggaaaagcttcctaaagaaaacattgaggcatctcaggctttaatgacctatttactcaacactggaattagagcagtgtgatatgtgtttgattcaatacctagttctgccactatcttgctctgtgatcttgagcaagttacttgccttgtctggacctaaaaagtatgcgtgtttttccttttttttcccatctcttcagtacccttttcctctaacagtgcagttccacctctagacaagaaagaagactcccatccttgctttggtactcctatagctgtacgcctcctgacaggacaagagaatgtgactggataaagccaatgccttctgctctagaccacaccagctaggtgggcccccgcccagatggtcctaagcccacttctagaatttcattgacctcttttttggatcttacctcccaactgcagaccacacactgggctagagttgtggtgaagggtctgctgtttgcaagtgtagacagagctggaacttgtgagcttggtgtccatacataaaaaattggaggctctttatgaggcaagagagagaagagtgggagagggagtagttagtaagctggagtgagagggttgggtgcattctccatgtatagctaaaattccaaggtgttggtagaaattctaaattcaagcctgaccttccagttgttatgaagctttatttgtcaaggtgggagtatatcgcattttaaaaaatagtttgtaacatgatttgtaacatttagaaatgtttatactgtcatgctgggctctgtaagtgttcagatggggcctgtgacagtccccttggaggaatgtcccctccctgattatgtgcagtttggagagacagggacttcattgcactgccttccttctatggaagcagcagaagacccttgagcctgcttcttccagagtcttctttttttgtcattgatgattgacatttctaatgttggtagtcaggtatgtgacttcagctcagacaatcgtattctttcttactggacttgagacttgggtggaatgactttgaataaaataaatttcagatgatgttcattctagcaggagtggatgcctgggttggggcatacctgttctgactcaggtcttacagctgggccccacctccttctccagactctctttcccataggctctggaagctcctcaatatccttctcatttgtgcttcatccagctggtgggtttctgtaggttatcatcaattaatcctgtggctattttttttaggcctcagatttctgttttgtccatgacctcacagagtcttttcagctctgatgtccagtagctcatgttgcagaagtttcagaagctactcagcttttccaaaataacaagttcatacttgtaaatgggaggtttctcagctattgatgccccccaaatagcatgagctgggtagagctcggggacaggagaatgagtggggaaggacattggacttggggggaagctgataagtccatggccttgaagtggactactgttgaggaatttctgggcttggtctttgtaccaaaggcaactgtgtgaccaacattgtttaatgggttcagggtgaccctaagttattccacctgaaggccagaagaatacaactccagctatgtacttttcattgaatgatccaatttaacccaatctaattagctcacattggtgccagttgaaggccctgaacatcactggattcttcaaggtggcgtgagttagtatctgccccagggagctcataggctgcacactggtttgacaggctttcccaaagcacctctcccgtcttctcgctcttactcctcctgagcaagagaacatttgcaccaacatccggagcctaagagatgcaacatatgcaacatatacattttaagaataaaaaaaagtatctgatttttcagaatctatataaccaaaagtgctagacctttctacccctctctgccctcctccctcacccactccaagcataaatatggaaagagggtgattcagtataattccatttggccagggctggagtggtgtctggaacactccttcggaaagatggtagacaaaacctctgtgcgatccagactctgggctatgtgactggattgcaaagtggtggtggtgttgtcctccttcttagtgcagggaggctctggcagtgagtgcggatggggaagtttgtaggcttgatgagtttgttctttagtacacagctcactctgttcctagccccctctgcagatgacaggaggtgctagacggtggaaagtaagatgtgtagtgctgtaggcagaaatttgatatggtgtaattactgtacattaaaatagatggaatttggatttgaaagcagagcagaccatatcttacgtgatgatgagaagggacacatcaccccacactgcgtcgcatgtgcctgaaggagcgttccagcctctgaaaatggcacatggaccaaaacgtccaaataaacacctcattgccgagagcaggagggggaggaagttctcaccgaggcagttgagagtagacgtgaatcagaaactacaatcgtatgaaccatcttttggttcaaacttgtacttgaatataaggcattgcaattctcttttcagaaccaaactggagccatgctaattcttttctgtggggaggatagagaaaagcaatagaatctcccaaggttttactgaaccacttgtgccaggttaggtcaagaagacatatgaggaagatacatgttctaaggagtttgatagtttatttggcaatctaaggaccagtgcaaataatttttcaaatatagtctgtaattgaatattattacacataatgcaagtaggaatgtccaaaacgaaagcatatgttgggaaggttcaacttgagtggagtggattcaagtagacagagggcaggaacatgtgctatctgattgaaagtgggggaacagtttgagaaatagtacacaggtgaatacggagatgctagatgcatgcagacgtgggaggaaaagagggagaccactttgttggcataagacaaagagaattcaaatgccggatggggacctgactagagagtctagtgattcttttctgcctatatcaaccctcagagcttctgatcatgaaataccaggttaaatcctgggtcaagcttcagagggtgggaaagaaccatgggaagtggtgtgcaatgacattttattaggaagagtgccatcctactagtactgattctcaggttttgattgggttttggattttctttttgttcatctattgatcttactgcctcagcgaatggaaagacagcataaagttgccttaattcctctgcaaagcattactgaatttttagaaaagaagatgccacgctgggtgtcctggccaccaggctggctttctctgagtctaacactgaatttcccgacctctctcccacatggcagagctcacagctgccaccactgagatgcagcacctgttagggtgattttctgaaactgctcttaaaagacattttaaatatataaacgtcactcctggaggtaaggccattttgaatgcaaagtgatcatcacatcttttgcaatctatttttagacttctttcctggagccagaagaatatgggccaactagttaagagggaactgaaaataaagcttggactgcagatgccatcaccagcattcacaagctgagataatataatggaccatgtgtttgcacttgcgctttacctcccttttcctcactccctctccttgagacctctgccaaggttgacacctggagcatgaagggtggagagtcagcaggcctgcagaaggcctcttggccagcttgctgttcaaaacaacatctggctaggagaccatgatttagctccaccctccacctccatcttacacacacacacatacacaaacacaaacacataaacacacaattctgcccaagtaccaatgaagacaaatggggagaagaggaaagtcgcaccgtcacccaaaaaggggctaacagacattaatgtcagccgatgaaaggcattgaccctagtaccaatgtctttagaaatacaaagcggagtgggaaaacacagttataatgacatccttttacttgcttttatttgtctttgacagatctgctagaaaaaaaatgagaaaacctaaataatatgacttttaccttacgcagaatatatctttgtttctaacacacatataggaacttatattagttaacaaaaactcaataaacttaaaaaattataaacatgtttcacacataatgtatttacttattaagtataactaaagtaataatgacaaatatttttaaaacaataacaattgttaggaaattaagcaatactctatgaaatacctttttgccaaataaaaattcaaaattttaattacatatttctattatatttatagaaaagaaacaatgcaaaagctacatatcgaatctcaaaaacagtcaaaattcctctccgagaaaaatttaaaatattacatacatacattatttaataacattgttaatgaattaagcattaactcaaggacatagaaatataacaataaaaacttcacagaaaatacagaaccaaatcgatagaatcagggtttaaatacattagaaaaagtaaataagtaaaataaattatatatatacttattctgtgcatatatatacgtacacaaacacatgcaatattttaaaactttttgtttttggaaatgctaaggattgcaaaaaagaggaaaaatacatgaccagtataaatattggagaagacgaaacaaaattatcatgatttgcagttaaccacattgtctttgtctaaatgttaagacaactgaacaatgattcaaagtaacatgaaatgtaattaaaataaatgtcaagattctctctgaagttcaacaaagtgattttaaagtatatgaagaaatcaattcaccaagaaaaaaaagttatatccagtaatgcagaaagtcttgcctatatacattataaagctacaataacaaaatcagtatggtttggcctttttttttgaccaagccaatggaccagaaaaaaaaattcagaggcattcctgggtttatgtcaaatggaatttaaaatctgtagttaaaaattatatggctcaatcaatgtgttgagacaatgaccaaccacatgcaaaaagaaatttgatgactaatttatgtgaataaaatgtttaaatgtaaattataaaattaaaaaatttagaagcaaatgtgggtgtatatatcattgacagataaaagaataaagggggaagctgagaaaactttaattataaaatgtgtaatactttgcccagtttgctctttctactttaattatagtaaattttaatcctaatacaattaaaatgctttctattgtagcaaatatataaattaactcatttatggtaggtttgttgtcttgcttggaaaatcctatgtgtgtgtgtgtgcctgtgtgtgtctctgtgtgtgtatgcatgtacatattaaaaacaaataccccctgaaaatcagactaacataacgtttaagagtatggattctgccagtgcggcagacttaatttccaagtatgtgtgaccttaggcaatttaattaatctttttatgctcaatttacttatctgtaaaatagaaataacatttcctaacttattggtgtgtcctgataattaaattacttggaatatgtaaggcacttacaacagtagttggcaaatttaagcattatatttgtgctattataattattaaaatactactaatgaacatgagaagtttctttagaattgaaaacgcacactaacattactaaaattattttacatttattttgttcaaataaatgcaatttaaacattaatgaattcttatttttaaccataaaatgacaaaaccaaaacatttcaactgtcagcaggttttcagagaaataaacactgtattaattggtttcaaactgattttatttttgtcttattcttaattgaaacttaatttcaaacatagcagtgcaacttggcaatacctaataaaatattaacaatacatatacttttaatccaacaattcttcaccagtaatatatcctatggaaattatacatggacaaatgtttagctgcaagaatgatctttccagtgtttagaaaattggcatgatttcttttttaaatgtctgatagaattcacaggtaaaaccatctgagcctggtgctttattttctgaaaggttgttaattatttattcaattactttaataaatatgggccaattcagattgttgatttctcttcttgtgtgagttttggcagacaggcttttaagaaattggtccatttcatctaagttatcaaatttgtgagcatagagttaattctaatgtttatttattatctttccaatatgtaagggatcagtagtgatgactcctctttcatttctgatattagtaatttgtgttttctcttgctctttctctgcctctctctgtctgtcttttggttgccctagctacagttttattacttctaaaaatacgatcaaagtgtaacttttgagtctgttgattctctctattgattttctattttcagtgttatttatttctactataatttttattatttgttttcttctgcttaatttggctttgattttgttttctttttctagcttcctatggtggaagcttagataattaattttaaatccttcttcttttctaatatgcacatttaatgctataaatttccctgtaagcactgtttctgctgcatcccacaaatgttgataagttgtagtttcattttgttcaaaatatgtcttaatttctcttagtatttcttttattcatgctatttagaaatgtgctgtttagtctctagatattttaagatttttcagcttctttctgttgatttctattttaacttcattatgatctgagaccagacatcatattatttctatacttttaactctgttaaggtgaattttatgacccagaatgtgttatatctcagtcactgtcccataggaacttgagaagaatgtgtactctgctgttgttggatgaagtattttataaatatcagttagagccagctgattgatggttctgttcagtttgactatattctaactgatgtttttgccttaggaaactaaattactgatagaggggtgttgaagtctccagctataatagtaaatttatctatcaacttttgcctcatgtattttggccctctgttattacacacatacacatgaagtttggagaattaacatttttattataaagtgcctctctttattcttgataattttccttgtgaagtctgttttatctgaaattaatttagtgttttatttttattacttctagtttggtatatttttctccatctcttcacttttgtgtctttatactgaaagtgaagttcttgtagacaatgtttagttgggttttgtttttatatccactctgacattctctgtcttttaattggtgtatttaaaccatgcaaatttaaagtgattatagatacagttggagtaatagctaccatattgtaactattttctatttgttgcccttgttctttgtttcttttctttccttatactctttctggtttgaattgagtatgttatatgagcccattttctcttctctcttagaatatcaagtatacttctttttacatttttaagtgattgcactagaatttgcaacatacatttacaactaatctaggtctactttcaaataacattataccacttcaagtttagtacagtactgcataacacagtattcccattcctcaccagccccttacaacattactgtcattcattttccttatatacaagctatagacactcaatatgttgttggtattattattttgaacaagttgttatctcttacatcaattaagaataagggaaataaaatactttattttaccattacttatgccttttctaaagctcttccattttgtatgtagatccatgttcctgaccaatgctcttttctctaaattgatgttgtttacaagagtaaaatttgggaaacagaataaatattcatcagtaggataaaaccatggtaaattcatataatggaaaactattaagctgttgaaaataattgcaagcttccacacttcacctgttctccaccttcccactggtaaatgaatcagagctgaggaaagttcaccaggaaaaaaattccaggcatcctgtgagcgtatttcagagagaattaaccatctctacttcctcttgtgcttctgagagtgttttccactgctgctgaggtgacagaggctgtgaagaaggagaacagagtgcccaacagcacgcagcaggacacagaatgtagactggcagccttgagttgtgggggtgcttagagtaggagcccccattaaggtttgcaaagtgcagctctcacaacacggggtcaggtggctggagaggggctattcctttgtcctgttaattacttgggttgtttctagaggcattggaatatgactgatttcccccaccaagcgttaactttgcctactcctcattcagaaaactaggctttgttgttctcccagcttcaggaaagggagaagtttttcccagaggaaaagagggggaaaaaaagtatctttctttctccataatttcagcacaacctagacccttggaagaacttcagaattctaggtatgggcaacattttaaagaaaacttcaggactcaaagtttcctctggagtgcagggagagaagcagagagatcagtgttctctgcaggggttccttcggcctgtaccctaagctgaaccttaataggaggaaagcaacccagaaaagttcctaggaaatctaaagcagtagtacgtggcacagattccttaacaacagccaggaaaggcaagaaagtcagtgaaggcagcaaggatttaagtaagctggtggaatttctagacagtggtaaagcccaggagaagcatgcatctcaatccccatgtgcttgagggcagtgtggatcttagggatggaccccctgtagcagtggaatggcccagtgactcagactagacacggggataggcacattggtgaatgtcagatggtattgagtatcagacacccagccttcactctatgagcccaggctatgcatagccctagaagcaacctgtgtggaataagtgaaagaaacccccagtttttcttaacttaaatttctataattcttataaaatggctgctcaaaatggatgttaattgagtcacaaaaaaaaaattatatttattaaattcttgtggttttagactaagattccaatttgatcattttaatgataattttaggcccaaactttcctggggtgatgatgtgaggagaagggagaataaagacaactattaccaagttgttgggtctgaaagtcccatctcactaagggttaaggcagaccatttcttacccaaactgaggaagctggcagccctgattgtaaataaggaattaatgagtgcatcaaagacaatgttgagattgcataaaaaatgaacagttcacaccttattttttcaaagttaacttttttcagcttaaaaacctgataaatgatttcaattaacagttacagaaaaagaaaattatattgcaaattcatgcaaaatcttccttcaaaatcacttgcttaattacacaaatcaattcttcagactgaaaatttagttctaaaatagaaagtaggaatgtttcagaagcagtcacatgggtaaggtgaaaatcgcagggtggtcggctctggcctttgttttatagggatgaaacatgataaatatcacagaaatctagtgttttatgacccaaagttgctccataaataacttagaatagtgtagtacattagaggtctaaggaagtacttcagacctggttcattctcctctttgggcgaaagtaacaataaaccctttaactctgagacagccccagaatatgttagttctggagcaattacgagttgccaagcaactcaaacaggcatgtggatgctctgttatgatccaaagaaatctttgtcatcatcattatcttcatcatcattgccatcatcactgccattattatcattaccatcatcattatcatcatcattgccatcgtcatcatcatcaccacctaagaaccttgcaatcatttggatgaaccttgatgtgatagaaaaggtattggggttagaaggcccagatactaaactgactcagcctgtagctggtggtttaattttggcaggtttccctgctctgggcctccctttatgcatgtgtggctgaggggatggtctcgataagcacagaggacccttctcagcattctctgttatcccatgcttgcccctgctttcttagttcatgaatctttaaggtctttgagggcaaagaccttgtcttgttgaccacgatatccctcagggagcttgtctgtgcttgtcttagagtatgtgactaatactaattggctagtgtaaattagagttgagtctgttttgttttgtgggggattggtggtgtgtggaagagatggagaaagacagaagaagcagtaaaatgtattgactgtttagagatgtaagtttttctcaccctcccctgatcaccaggcaggtaacatcctgggaccttggtctctaaaccccggaaaacacattcatgttatgcagcatgtttgcttgtctcatccaatatggtgtcatactccaaatttaacatcttttgatctatatctacttgagttcaaggtgctcttgattttgagaattatgaattataaggccaagctatcaatccccacacaccctacatacaatgttgaagtggatagtaaaatcacaataaatgcttcctttgaaaagagggaataatgggaggtatgtagcagccaatggtttatgggcattctgaaaccctactgtgcaaacagggagagcattacttgactaggtcatggttctgttttctgagagtggtttcccattcattgtttttcaaagatcttgacaccactgtttgagatcccatttgttttctatcattctctttgactacttctagaaaaactggcctgccttggcaatgagttgctttttcagcctgcttcttgaccttaagaagtttggggcccaggagtgtctttataattcaaaataaatatcagttttttttattatatactggtggcattttgccaattcaatttcattaaaaacctcatggaccttctatgtatctaactagtttttactccatgcttcagattccaaaactaaaatagcctttgagaaagacttttctcttttaagttactagtttgggattaggcctccatgtttttcatcttctctttagtctatctgagaacatgtatataacatttacaaggtaagtgacacctatgtttagtttcttgtactcagggctcattttattttatttactttaaaaattaatatacagtaaaattgacttatgttgcatctacagttctatgaattagaaaacatgtatagatttatataaccaccatgaagtcaggagggagaacattccatcaccttaagaaagcccttttataatatttctttatagttacatttttcccaactactaacttctgataacaactgatctatttttcagcattgtattttgcattttcatgaaagtcacataaatggagccatacaacatgcaagttttcaacactagatatactcactcagcataatgcctttgagtttttgctcttatcaacagtccttttgtttgtgcagataagtaggattccagtatataaatgtactgctgtgtgtctaaccatgaaaccactgaaggacatataggttgtatctagtttggggcaattatgaatagaattcctctaaacatttgtggacaagttttaatgtgaacaaaagtgctttaaaaacatttataaacatttataggataaatgtctgtgagtgagatttctgggtcagtggataagtgtatgtttgccattatacaaacagaacactctttttttataatgcttatgtaattttatatttctaccagaaatgtatgagtgttccagttgctcttcatcctcactaacacttggtattgtcagtatatatttttaaaatttttaaccagtcgtacatgtgcagtggtattcatttcagctttaacttgcatttctctaatggctagtgatgaaggtaattttttgtggcttatttgtcacacatgtataatcttcagtaaaatgtttgtgtctttcatcattttctcattggatttttttttctgtttcttattggattgttttctattttatatgaactctgtatgaattccttgtcagctatattgtttgcaaatatttttccaagcctgtagatattttctcatcctcttaacaatgtctttcaggaagaaaatattttaaattttgactaagtgcaatttattgatttatttttatttgatgaattgttataggtgtcatgtctaacaagtgttcaccaaaatcttggtcctcaatatttccttatatgtatcttttttaaaaatttataattttacattaaatccatgattgattttgagtcaattttggtagatttagatcaaggtgtgagttttatatcaagatttacttatttatgcatagtgatatctaatctctagcattatttatcgattcaattgcttttatatccttggttgaatttgaaagtggctatttcttattttgctattctattcactaatctatctgtgaacccctccagcgacagcacattgtcttgattactgtagctatataataactccttttttttttttgggggggaggatggagtctcactctgttgcccaggctggagtgcagtggcgcgatctcagctcactgcaacttctgccctccgggttcaagcaattctcctatctcagcctccagagtagctgggattacaggcgcctgccaccacgcccagctaatttgtgtgtttttagtggaggcagggtttcaccatgttggctgggctggtcttgaactcttgacttcaagttatccacccacctcagcctcctaaagtgttgggattacaggtgttagccaccacgcccggccattttattctttttcagaattattttcgctattccagttcacatatatatatttttatatagcatatattttatataataaatataaaattattttggctattctagttaatatatattacatatttacatgtaaatacaacatatttcataaacataatatatactttgtatataaatataaatatattataaataattatataaatctgtaagtataagatataatttatattaaaatacaaatatatataatttatatattatatattataaatttatatatattatatagtatattacatatttatatgttaaataaataaaatatatatttatgtatgatatatatccataatgcttatatataatatatatatgcatatatttaaatatataaatatattatatacataattatatataatttcttacatatataagttcatgtatataagattcatatatatatgaataattttgcctgcatctagaaaacaatcttgttgggattttgataggaattaggttaaaccagtatataaatttaaatttgggaagaattgacagctttgttgtattgaattttctaatccctaaacacgcactgtatctctttaacttagattgtctttcatttttttcatttacaatatgcagcttttggcatacatacatagttagatttgcacaaaaatattacaccaattgagcaattaaaaatgatattgtattttaaaatgtatttctacgtgtcaaaaatacaatcaatttttgtatgttgattctatattctacatattttgttgaagtaacttatactttctaaagtcatttttgtagactgtattctagatcaaagtaatttaatgtcgacaacaataccaactcagttatttcagttgttaaattaactaagtgtaatgtcacaaatggcaaaaacagtttagacaatcggtcagaaaataaccaaagacctcatacccttaatggtctggatttaataataactacaaagtgcttaatatgtaagagtaggaaatagctaatttccctccagattctttattattttctatgtagaaactcatgtcatgtagaaataagcacagttttctttctttccaatctgtacgcttattatttccaattcttgccttattgctctacctagatcttccaatattatgttgaatcaattattaaatatggttgttgaatagtaatgataagagtggatggtattagtttccaatctcaaggggaaaacatcagtttttcactattaaatattacattagctgtaagtagcttttatagatgctctttatcaacatgagcacatttccttttatttctaattgaccaagagtgtatataatgagtgggtgttgaattttgttaaattagtttgtatcagttgataaaatcacgtgatttatttattctttgacatgataatatggtagattatattgactgagttttcaaatcatgaaccaacctggtattcctgaaataaacttcactgggcaaggtatgtaattaacatgtgttatgtatttattttgggggggcgctatgttttttggtgtgtgtatgtatataattgtttataattcttgttaaattgatccttttgtcattatgaaatatattttatgtctatattaatataggcaatccatctgtcttctgtttactgttcgcattgtttattttttatcttctcttccaaaacttgttgtctttaaatgtaaacggagactgttgtagacagcatatggcttgattgttgttttccttttaaaattcattctgccaatatctgccatttaattggataattttattcatttacatttaatataattacttgtacgataatatttacatctgtcattttgatgtttgctttctttatatcttgtcttcgttactcaatttttcccttactgactttttgtgttaaaatattttttcatctgtaccattttaatgcgttcatcgtttttttcttatgtatttttgagttattttcttggtgggtttcctgaagatggtcagtaacatttaattttataacaacctactttggattaataccaatttaatttcagtagtacacaaaaactctgttcctatatagctccatttgtctcttcctttgtgctataattatcacaaattacatctgtatacattgtgtgcacatcagcataaatttacaattattgctttatgtagctctcttttcaattatatagcagaaaaaagttacaaaaatatttgtactatattttgtatttagctatgtgattacctttatcagggttgtttaattcttcaaatatattcaacttactgcctggtgttctttcatttcatcttagactccttgccatattttttatagagtaggtcagctaatgattaactttctgcttatctgagaatatcttaatttctcctttatttgtgaaggattttaaaaaatatatatagaaatctgttttgatagggttttttttttagcattttgaatatgtcattctactgccttttgtctcatgatttctgttaagaaataagatgttaatcttattgaagatctcttgcacataaattgcttatctcttcctgctttcaagcttcttgttgtctttggcattcaacagttatgatattacttgtggataccctgaagtttatttttcttgaagtttgttaagctctttgaatgtgtagactaacgtttttcgtcatatttaggaaatcaccccccacagtctgaactctcattatatgtatattagtatgcttggtgttgtcctacagatctctgatgctctgttcatttttcttcattctttttattctttctctttctcaaattggatactgtcaattgatctatcttcatgtttgttacatctttcttttgccttcttaaatctgctgttgagtttgtctagtaatttttttcagttattgtactttacaactccagcaatcatatatacatatggatataatttctatatattttattatatatttatttaatttgtttaatgtttaatttacctactttattgtatatataatttctatctctttattgatattctatatttgttatgtaatgtcatgctttaggtttttaaacttagtttccttcaactaacaaaacatatttaaaatcactgacaaagtatttgctagtaagtacaatgtccatacttgctcaggttcagtttctatttgttgctttttttctatgtattagggacattttcttgcttctctacatgtcttaaaatttttgttgaaaatattttaaatattataatatgtcaactctggaaataagcttcttccttttttctcagggtttactttatttgctgtttgctgtaattgctgtttgtttagtgatttttctaatctactgttgtaaagtctgtattatttattgtgtgtagccacttaagtctttcattagttagtttagtggtcagctaataattggacagctatttccttaaacacttgaaagcaataattctcttggtttttgtttaaggtctctgtatgaacattgaggcatgccttcaacactcatccagacagttgacaattatgcctttctgcttgtacagagcctcaggtccagccagaggtgagtgcttagggccttctcaagtcttcctttattatacacatagccctatgtatctgcatgactttctggatttccaagaatatgtcacaacttttcaaagctcctacggatgtattattacccagcttttccttttaagttagtctattgtttttccaaactgtcatccatttccttgggcagccatagtgttaaaacatttgcctgtaaatgtttttgagaaactccctctgggatgaaatttctagtattgagtatcaagttaggtcaaataaagacaggatgttgtagtaggatcttacagggaactatcagacaagtcaaattctgacaatcctttgaccatttgttccctttggtactagaaatggaagctattgtttttcaaggctacttctttgctgaggactgggggatagaactagaataacttaaaacatcataaaatttgctgttaaactaagagtcaaccacttttcttctataaacactttgtgattattgaaagcctttaattaatttccaaagttccataaaagctgatcctgatcatatattttgccagttccttttctttggttttatgtaggggcaaaaaatttacagaagtccttactgcaccacttttactgacatcacccatttctatcaatttgtgcttcacacattttgtagctctgttgtttatttatctacaaggttagtattcctattaatttttgatagagggacacttttgccattatttaatattgctttctgccactggaaatattctttcctcaaaatctactctatatattaatgtaaccactcctttaattttctcttcatttctaaaggatattttctctggatatagaattcttggttgcaaattattttattttagcacttgaaaaatattgtgccactttctctggcctccctgatttctgatgagaaatctgatgttatttgaattttttttcctccatagataatacattgtttccctctatctgattttgagattttaactctgcttagtttttagatggttaatgtgttttggcatgaatttttttttgtttgttttgtttgggtttgcttcacttctggaatctgaagctttatgcttattgtcaaatctgagaaattttcagctactatttctcctagtactttttaagcacttacttctttttctagtccttcttggactctaatattagacacaaatattgaatctgttgttacagttttcataatgcaagttgccatttttctacctcctataatcaattataaactattttttctgcttttgttaaagggttcctcactttttttctagagctcacatttcatccagccccaaagccaatgctacatatttcagggttttgttatgacacttgcttttacataccaatttctatatgtgttccctcttaaggcataaccattctaaaattaaagacttaaaatcacaaccatttataacttttcataagtctaaaggtaagctgggtcattttgtttactggctctgctaatgtatctatggctagctactagacaaaccagagagtgcctggtatagagtagcatctacaaaagaggctggctgacttggctctgttctatatgttcttttatcctctatcaatatagctttcttttgtttcattagtggtggcagagttccaaaaattgctaaaatcacacagtctttgtgaggtttcgtcttggcactcacacactctcccatcttctgcatttcattggctaaagagattcacaaaactagttcacattcaaggggtaggaaaatagactccatctcttcgtgggagaacctacaaaaatcacttttcaaaaagagcagatatagtgagaaaaaagtaagtccactttcacaatgaacctacattatcaataacagtttggccaaaacaacaacaacaacaacaacaacaaacacttagaggccttcttcatgtggctgggtctcagacaaggccaggagctcaatattgaaatcaggttctgggaagaaaagtcagtggactttaaaggcgagagatgggtgttgcagaggttctttgaagagcgtggaatacacccaaactccaacatttgaagatacccctgatttgggttaccaacttgcaggtttatttaaatgcaagatttaaagcatagagtattgctaatgttgctgtttgcagtcctggctctctctggatgaaataatcaaagaagctcagagagcaagaggaaaaaaagcaacataaatagaggcaaaaaataagagaaaagcaataagcaagtaggctaaggcaaagaattcaagcccaagggtgtagaaacggtagtcgaagacctaatctgttagtatcctgatgcattgtgtggctgttgtggcctcattaagaccttcagtctccaggaccatataaagctggactgcatttggaatggtcctggtaatgctttctgaaaatacagtgtgttggcttctactgagagcctggagctgtcagttcctcaggagcttccagaggaattgggaatttcagtaggcttctgtggctaataatagagctagaaaacatatggactccctgcaggctaggagcccacaggtgatgcaaagaggacatcattggcttttgagagcagcagagaaaccttttattggaggtcacacagcaagatcatggatgttgctcagtgggtctgcactcatgggaagcatgtgatcatgggcaatgcaatgttttctggctgcagagagtctagaatcttaaaggtcctcttacccatcatgggaattcattccagaacattctggacccctctcaggggcaggtaagaaatgtctattcattgaaaccgtctaatgcattttggggtggtttttagaacccacttatttagtctgctgtgacctctgatagctcactggggactatccagagacaccatgaagctgcacctggcagcagatatgctcttgttctaatgagttcctcagtttctgctctagtggcttgagctatgcagcttaacgtaatggccccagacatggagggattgactgttccttctgtagagactccaagataataaaaacccatataaatggtcacagatccattcacagtggggttggatgtcagaaagcgctcagggccttggagcagggaagtcatccccaggcagtgggcttagtgaaccattgtcctagacgtggaacacattgtccttcttctttttactttagtttgccatttttataagaaaaaaaaaaaaaactgtgagattgggtcattgcctctgcacttctttctcaagaactgacatatccagtgcgaatgaagctaatgatgagagacaatattttaatgttaattagacattccatgtgtcttagttcatcagagaactattgctcttttatgtatcagatgaaagcagagttcttgcttggagaaaaacagagtacacagtcagaaaggagagtattttcagtgttgtaattattcaaatgattgttgctttttagaaaagcaaaagattttgagagggtgggggatacttagcaagaacacaactgcatgacaggaagccactgcaaagcctctaaaaccctcttctctctctttcagcaaacattgctaaaagctgtaatctccagttagaaaacaaccttgaagggagtttctcagtggcctcattagacaaacaagaggtggtaggaccaagcctcctttggaatggacctgcccagaaggaaaggggacaaaaggtacacagaaagccccctggtgtctgacggcccctggaaataataattggaaaaagaatgaaaacaattgcaatacttctgtgaactcaattgttctatatataaaatgaacatgttggactagctcagtgactctaaatgaaggctacagagttcttctcttctgtgacctctagggagaaaagtagagttacaatgttagggtagtgatgcttttaaattacatgtccaaattagctcctggcattgatgagaatatgttgtatctttctagtaggtagggacaggaaaaggtagagagtgtgctatttgattgtcctgccaactctttcattccttaatttgggaattagttgaccccatttgacaggtgaatcaatgaatagctaaattactgacatatataaataaaatattcatttattttcttttttttgcatttgtagttttggaacaattttacatttacagaaaagttgcaaagagaattcctatataaccttcacctacttacccttaatattcatatctttcatagatgtacatttgtcaaaacatttgtacactactattaaataattccaaactttttttgggtttcacattttcccatttatatcccttttctttcccaggatacaatctaggatactatgttgcatttaggaaatatttattttagtgtgtaaatatttatgctatgcattggtttgatggaattatgagtcaaagaatgatttatgatccccactttacacaacctcttgtctggaaggcataaccacatgtgcagaaacatcgatgcatccttgtccttagatcttcaaatcaacatgctaagtttgaggatgcacagtcagtgggaaggccttccctggaaaaccatgcaggcagtccatattggtgatgccagttatataccagctaagccccacatcctgactgcatggaaatgtggcaggaattggttggtgggatgctctgagcaggaccattcagtgcattggatgagtcagtcaaacaaattactactgataaaaagactcaaacaagttccttctcatcatgtattcaattttgctttactttcttctggttcttttggcattatgcagactcaaactgaagtgtgtagatatcatttgtcataaaaaaaaactcaaataaaactggtgtaacctttttcaaatggatctgctttgatggagatatgggaaactgggcacagcattgaactgctggagggtgaacaaattgatacattcttcaagattgtcatggactttttatagttcagtacatcaaaacatgcatactcgttacccaagttagccaaaagatattcacaacagtgttgtgtataataacaacaaattagaagcaacataaaagtttggccaagattctttaaacaaattatagaacatgatgcaaaatcaatatgcagctttaaaaaaataacattgaagaatatttaatgacacattctattacaaaaatagaagattaatgtatagtataattccttttttcttttttttgagacggggtctcactcttttccctaggctggagtgcagtggcacgattttggctcactgcaacctctgcctcccaagctcaagcgatcctcctgccttggactcccaagtagttgggacacaggcatgtactactacacctggctactttttgtaattttgtagagacggggtttcactatgttgtccaggctggtctcaaactcctgagctcaagcgatcctcccactctggcctcctagtgtgctgagattacaggtgtgaaccactgcaccctactgtccttttgtgttatatatacatatataaaaatatttgtatcttgaaagttatttttactaaatatattaacagtgattacctctgggagcagggagcttttgaacagttttattgagatataatttacataccttacaattcctcctgtttgcttattctagacattttcaataaatgaaattatacagtgtgtggttttttttgtgactggcttctttcacttagcacaatgtttccagggtccatccatgttatagcatgtattggtaattcattccttttttgttgctgaattatcaagttttgttgtatggatataccacattttatttttccatttatcatttgatggtcatttgggttgtttccactttaaggctattataaataatgctgttataaacatttatgtacaagtttttgtgtagacatatatttccaattcttttgtatatatctaggaggaaatttcagggtcatacggtaattatattgcttaactttttgagaaaccacgagattgttttccaaaatggaagcaccatattacattcttaacagaaatgtatgagggtgtcaatttcttcacattctcacccacacttgcccttacctgtcttttagaatatagctaccataggctgtgaagtggtatgtcattgtggttttcatttgtatttcctcaaatgttgaacatcttatgctgattgataatttagatatcttttttagagcactgtcagatcccatttcaatttataactgaatttttatttgttgattatttagttttatgagttgtttatatgtattctgtatatcctgtatacaaatcctttatgatgtgtatgttatgattttcaaatattttctcacattctgtgagttgtcgtttctctttctgaatggtatcatttgcagcatggaaacttttggttttaaagaagtatatcataatgaagtataatttatctatttttcttttgttccttatgcttttggtgtcatatctaatataccacagcctcatgcagatagcaaagattgacttctatgttttcttccagtaattttgtagttttagctctttttttttttttgaaacagagttttactctgtcacccaggatggactgcagtggcataatctaggctcacagcaacctcagcctcccacattccagtgattctccagtctcagcctcctgagtagctgggaccacatgcgtgcaccaccacgcccagctaattttttgtatttgtagtagagacagggtttctccatgttggccaggctggtctcgaatgcctgacctcaggtgatccacccatgtaggcctcccaaagtgctggggttacagacataagccaccacgcccagcctagttttagctcttacatttaaatttattttccatgttaagttaatgtttgtgtgtagtgtgaggtagacgtccaattttattcttctgtatgtggaaatccagttgtcccagcaccgtttgtcataaagagtgttcattctccattgaatgatcttggcacccttgtgaaaaatcaagtgacttcaaatgcacggctttgttttctggattatcagttctactcctgaagtcagtaccacactgtcttgattactctatctttgtagtaagttatgaatttgggaagtttgagtcatcctactctctttttctttcccaagattgttttttctattctgagtcccctgaatattcgtataaattttgtgatcattcctgatcataattttctgcattttctacaaaatggcagctgaatttttacagggattgcattgaatctgaagaccaatttaggaaatattgccaatattcagtcttcctattcatgaccatggacatctttctgtttgtttagatcttctttcattgttttcaacaatgttttacagtgtttcattgtacgagtcttgtacttttttgttaaatttatgttaagtattttattctttctgatgctattataaatataattgtttacttaatttcattgttagattgtttattgctagtatataaacacacaaatttttaaatactgatcttatacaatgctatattgctgaactcatttattacttctaatggggcgtgtgtgtgtgtgtgcttaagagtttctatgtacaagatatacaagataacttaatctgcacatagtggtggttgcacttcttccttttcaatctcactagaatctccagtacaatgttgtatagaagtggcatgagcagacatccttgtctcattcttttcattttctaatttttggcccggagtaagaaagcattctgcctttcaccattaatattgattaataatattgttgattttaaatttttttcttcttttccttatatgtatttgttattttttaaattttaattttagtatttttaatttttttaaattttttatttttagacacagggcagtggtgtgataatagctcactgcaacctggtctcaaaccatcttcccatttcagcttcccaagtggctgagactataggcacttcaccccatgcccatcagctaattctttttttttttttttttgtagaaacagggtcttaccatgttgcccaggttggccttgaactcctgtcctcaagcgatcctcctgtttcagccacccaaatgcgggattacaggcgtaagccacctcacccagccttaaattttcaataatttgcaaatcatattcgtaatataaaagttagtaagaaaaaagaataaatgtcccagaccatagcagttcatcttaatggaggagaaaggcagatatgagagaagggcctgaaatacacactgctgccatggggggggtcttctgattactcagagtctctgcattttagctttctcactgatccaaggctgccagccagctaaggaagtagatggagagaggaccaggagcaccttgtgaatttcataaccaagccacactttctaagccaggagaaaggggagaggtgaccccagtataagaaaatgtatgttataaagccaacggtcactcatagaatgtacacaaccaagagtgatccctaactaaactagagacgttaggtggttataacacgtcactgtgggtttatcggttacaaggaatgtaccactctggtcaattctgtggataaaggagatgccttggagatcgaggaatatatgtgaactctctgcatcttcccttcaattttgcagtgaacttgaaactgctttaaaaaataaagccaatacataaataaataagtaaacaaatttaagcaaaagagatggtgataagcaaaggaattgggtgggtcttacatcgcaaacctttctaagcacaccctaaaataaggctttaagtttaagttgctcatttgggagttgaccccaggaagcaccagtaggggaaagaggaaatgagaccaggaatgggaacaagccaatgtggagagttttgatgtacaagatatgatggggggtctaccggggacccctgggagactgtgtaaaacacacctcagtgttgtcgtcccatctgaggggcaaggaagctggggtgtttgtcttcaatggccactggcttttcactgacacaggcagggcatgccttgcctggcacagtaggcctatctcatgtgggagctcgtcgtgctcttgcggccatggaaagcccacctgcagagtcacagagacctgcaatagaagctctactcatgttcgggaaccgtgagccctgaagggaaatgctctccactaaaggggtaatctatttttgtacaggagttctctttaaccagataactttttagtgaacttaaaatataatatgattttaacatttcagattagcacactttgtgacaaattatggcactcccaaaagagaaacttctcatccagtgctaactcctttccccattcactgtattttgcatggggccaggaataaaattccatggggctcttcacaattttgtggaattgatcaaggaaatacatcgtggtgtccagatcacacctgggtagttggcaaatgtgaatctgaggccaggtttaggagtactgggaaaggttttaatggaaccaagctcaagcactgtgcacagaagctggggtgaggagagggggacaattggggggcaggcctttgtagcctcttttgaaaggagactgcctgtggcctgctctgcaggagccccctccagaatcactcttgatgatcatcagggctctttattgacaaaaactcagcccaaactcacataaaagaaaacagaatctactggtttatttggttggaaagttcaagggattcctttggacagattcataaacaaagtgtctcttcctttctcagttctgctgcttctgtgctggtttcactctcaggcaggttttcctctgatgtgttggtggtcagatcgcagaggccaaggttctgcatccactgctggaggaaagagatgcggtcagcctcacccaacccacgtggagtgaagatagacaaagagccctctgcaaaggaaaattggagtgcagctgccagacgcaggagtgatcctgggcaagtgaaaatgatgaagtcattgtcaccatcaaagtgagtgtagacatgcctctctgcctgtagacatgctcttctgcctttaagacacacttaagttattctttatttattaactatacacccccctgacaaccacacacacatacacatgcttaaaccaattgttatgatttgtctgtgtcctcacccaaatctcaccttgaattgtaataatcctcgtatgtcaagggtggagccaggtagagataatcaaatgatagaggtggttccccccgtactgttctcgtggtagtgaataagcctcagacatctgatggttttataaagggggattccactgcacaagctctcttgcttgctgccatgtaagacgtgtcttgcttcccttcaccttctgccatgattgtgaggtctccccagccatgtggaactgtgagtccattaaatctctttcctttataaattacccagtcttgggtatgtctttattagcagtgtgagagcagactaatacaccagtgttggggctcagaaagcaatatccgaagtatagcattttgacatgaggaactgaaagttccaatgtatacatgttcagtaaatttgcatgccttttcttctactaatcaatctgcctcatgccagtgaggcaaaaggaacaaaaatgaaaatactacatataaaggcagttcttagaacaaaatatatatttttaaatatttgtgttagagaaagaagcctaaaaacttatgagctaagtgccatattgagaaagataaaaaataaacagtattatccaggcatggtggtgtgcacctgtagtcccaggttcttaggaggatgaggtggaagggtctcctgagctcgtgagttcaaggctgcagtaagccatgatcacaccactgcattccagcatgggcaacaaagagagggctcatcttataaaaaagaaaaaagaaagagcaacagagtacattaaagaatatggaaagaagaaactaacaaaggtaagagagaggactaatgaaacagaaaacaaagacacaatgaagaaatcaaatcttatctttttcttgaaaagatgataaaaataaacaatcttctggcaagactgagcaaagcaaaaacagatcaggcacaaataattttaggactgaaaaaagagacataactgcagattttgcagagatgtaaacaatagagaatacttggaaactttatggctttaaattggaaaacttagacaaaagggaacattttctagcaaaaaaatgaaatctgaaaactgactcaagattagggaaaatcttcactgtatatatgtatatgtgtgtgtgtgtgtgtgtgtgtgtttatagtgaagttttgtgtgtatatatatgtatacacatatatacacacacacaaagaacttttacaatcaatattattatttatcatattaataatacccttgattataattataatgatatataattacattatcattaatcttattattaaataagactacttaattttaaaagatgagcaaaagatttgaacacacacttcacataggaagacacacttgccaataattaataagaagtactcaaaattagtaatcctcaatgaaatacaacttaatataacaatgaaatacaacttaatataacaatgaaataacatttcattcccagtggagtggctaaaattaaaattctatcaccagatgttggtgacgatatgtcacaactgaactctcacacattgctggtgcagtgtaaaatgataaaacatgataaaattatttggctgtttcatataaagttcatcatgtacatatcgtaagactaagcaaatccactctgagatatttacccaaagagttaacaccactgttcatgacagaagtacatataatagtccaaagctgggaacaacctaaatatacgtcaaggggaaagtggcaaaaccaattgtatatattcatacaacgtgacactacttaggaataaaaagaataaactactaatacaccattaatatggataaatttcaaaaagactactttgagtataaacagcgagatacaaattaatccatattatgtgatcccatttacatgacgttctagaaaaaacaaagctaatccatgataaactatttcttagcagtggcagtttgcggagagcatgaggaggcaatgactggaagggtgcatggagaattttcctagtgatggaattattcaaaatttttgtggaaatgtgggttatgtgggtgtatgcacttgtcaaaactcattaaattataaacttaacaataatgcattttacgatatatgaattatatcatagtgaaaatatcttaaaaactggcccaataaagataagcaaaatgaatcagtggctaaatatccacaaacgcctacacacacatgtgcatacactcaactagcaaacaaataagcctaaatggttctacaaagttctaccaaacattccagagatggattgcctcagtcttgttgattccacaagatggggggtacttttctccacactaaaatcaggagttcatctgccttccagcatgtggggtggctgtagggtaggaagacctcagagaaagaaggagaataaaacaatatgaggctggaggacagccagggccatacctgcgggtcctagaaacatgggcagcagacattgttggttgattaccgcagagttcttctgatgtccctactttattgctaataaaaccctatttttgttcaggtagaaggagaccttgagaatgagtgcatgctgggccctgcctcaatcccagaagatgaatcttcatgagtctaacttacagacgtgccattctctttgccatgacttgttttaaagaaaggcagctgacaaaatacaggccaaggggatgtgaatgaagtcccatagtggaggagtggtagtggctggtgggactttcagaaatgtttcctagactttaaaaagggaccaagagaagggaattctgtcatctggctttgagttctgccatgtgccagtgtggtacttggagttcttgcagagatcttcaagccaggaggaccagtctaggggacaaaacccacattgaggatgccaagaaagctagaagaaagctactgaaccaccaaattaaccaaatatgcacacttcttctggatatttacataagagcataaatgttcccaagtcattcttaacataagttgatcctgttcccttatcactcgctccccaaagcactctaaatacttccctataatagggatttgagtatttacggtaagagcaaagggaaggtactgacaaattttaaagaagggatgcttgaattacggtttaaaatgatcactctgcctgcagtgtgaggagtggactgggtgagaagaaaatggggagggggataaggagccaatggaaatactctgcagaagagatgaaacatatgacatctaagaccctggtggtagaggtgatgatggagagaagtgaatcaattcacatatatttagaaagaaaaatcttatatgttgcctcctccagaaagccttccttgattttttttttccaactggatccctgctgcattgaactctccatgtgttaaatcttccaatgaacgttgtgtggacttctctttagatactggttctgactcagggcattcaaacatgttcctcccagaagactaggagccccctgaggactgagaccccattctcgctcatctctctttccctgagttactgatccctggcagccactcagccatctgtggtcagctgagctgcctgccttgcctggaggaacgcaggtcccacagctgcctctgtccggcaggcaggcaagttgtaccttcagttttcatccacccgcctgtccatctgtacctaactcatagggagctgacatggtgctgtgtggaaacaaaccgtggagcgaagggcagtgaggggcaccctagccctccatgcatggctgcaaatggggagactcaccctgcctctgccaccttgagaaaattactgttcccctctgagcctcagtttatccctctgtaatgcaggtggaggtcggagagtggttattcctcaggattgaccgtctggttgaggtgtggccttccttccacaacaggctcccaatcacgtcctttcttccttggaattgatttctactgcaagaagctggagagagttacatgaggaacccactgacagatgacaaaagcaagcctttgcagagcacttttgtttttctttctctacagattcacattgtgcgtgttcagtgagaaacagaacacagggctgttggctttggagggctgtttattttgaaaatgcaggtagatggtgggaagggtgatggagccattcgcagacaatagccattgtttgtgcccagacttcgaagtggctgcagggctgtccttggcctccccttgggtcccatgacacctggggagcccggctggacagaccctttgcaggttgcctgactctaagacataccagaaggacataaataatcagccaccgactctttcgctcgactataaaaagcgtgcatatgctctgcgcaggttttcctaaggtaagggacagagctgggcaaaaccgggcttctggagctgcccatatggggaggcggtctttcaccgacgattctgcagacagaaattgcccatctgcactgtttgcaggtgttttgaatgattatattattagctctgtctgttcaactttgcttttttatggtggctttagtattgcagtaaaaaaaaaaaaaaagggaagacgaagaagaaagaaaaaagaaatataaaggcagccatctggttcccgatttgtgatcgtgttctctgtcagtaaagaggggagaggcagccactgctctctcggggggtggggcaagcacagggcagcccccagttctgcccttttccaggagagtgggatttggggtaggcaagatttttcattttaccagaggaagctggtttattttctaatttctcctcccccgcctacaccttgatgctttgcagctgctgcggagctcacctgggtactggaatcaatgattgatgtgtcccccagagctgcagcctggcctggagaactggctgtgtgtgtgtccgtgtggccccggagagtcaggctggggctgtccatcccacccatgactctgggccttaatttgatctgtgctgtgacctgtgaaacttctcagggcatcccgactgcaggtagcaagacaaagatttatttgattatctgtgcataggtaattcatcagggaaatgctctctgtgtcagatggcgcagaagcggggttatttagggttgtgcagcgcatccagggctgggagggtgccaggagccaccagcccagcaaggtcatgacgcctccccgctgcaggagataccaggcagatccggagtcacacttgagccagaggatgctgtctgccttttcattggcttgggcaaagagaagagaattgtgtaggatttctttcccccataaaagggcagaaacaatgctccgatgtaatctgaggaagccaacagggggtgctgacacccaaccttctcttctcttcaggtaccctaccctagggacagacaaaccatgacagtaaaaagtattctatagataagatatattctaccctatatacatatacaaaactacacaatatatatacattgctcttgtgacctgtctcctgcaacaggcaatcatggtgacacgtggattcatttgtcagttcagtgaaagaagcagcatcagccatgggcctcttagagatccagaagccagaaggaggaggctggaggaaggctccagagaaaagaatccctaaaaatacactcccctgattgtagaactgtttccatttggcatttctgattgcaacgagcagaatcccacccaagcatgcagcaggaaggcaggcttcttgggtgttctattagggtgggagctgaatttggatctttgcattctctccccactgcatctcacttcaagaagtgaaccaggcagtttgtatttctttctgtggggtacaggtgcagagcttacagcagaagctgggaatgggaagaaacccttttcctttactttataaaagccgaagccactgaagattgtgtccacagggttcctgaaggaatatggatctgtggaaagcagcaagggagagaaagatcgtcctttaacctaggaagaggaccgaagccagagcctggggtggtcagcactctgccctaggtccttgtcagtgcctggagttggtaggacattggaggtgatggatccatggtgcacacggcatggataaaaccaagtcttgtggtacccagccatggcaattggttatgtgagcagcagaatttatagacatcaaaaactatataaatgcaggtaaccactgtagggagaagaaaggtggggtggagggccttcctgggacattttgctttgcataacacctcacagtctttgcctgaccctgaaggagtgggtaaagtaaggagctcctcatataccagaaatggtgccttcttattgaatgaagcgattgtaaatcaagggtcgaatgtctttgattgagtaatagtaagaaatgagatactttggcaccattgagcttggagctgcaaattcacatctgtagaggcgtttgtggggtgtcaaaggaaagtttaaagaaagacaagatcaggagccacaatagcctagagtgagaaaggaggtcaaggaagccccaaaggcctcagcagtacaagtctgggttttgactctgtgatccatggaagttataggtgtggtgccaggtttaacatatacgagtgctattattatgtaggccaaacaagccaaatgctggtcatttcagactgttcaaattgatagctgagagtgcacctttgggattcagactgcctgagtttgaagtttatcacctttatttattagctgtaaaatactttgcctcccttccttcctgccttcctgcctgccttccttccttccttccttccttccttcctttcttccttccttccttcctgccttccttccttccttccttcctttcttccttccttccttcctgccttccttccttccttccttcctttcttccttccttccttcctgccttccttccttccttcctttcttccttccttccttcctgccttccttccttccttccttcctttcttccttccttccttccttccttccttccttccattctggttagcctccctctcttatctcttattccctttctccctccctccctccttccttccttttttttgcctcagtttcgtcacctgaaaaatcaattttataatatttgcacctgctgcaatacacctgttagaggattaatacagatgcacaagactacctgccatgcaattggtgttcaataaacattagccagagctattctgattgttgttaccctcagtatatctgcttccttcctttctctatactgagagttagtatagcttagagttaagagaacaacatttgtagccatacagccaggattcaaaacaaaatgtgtgaattatttaacattattaatctcatcttcatcatatctggttgctgtctttacttcttccttctgagtaaggcttgtcttgggcttgctgtggtcccagctcatcattggtatagaaagaggaaagaagccagggccttgggtgatcagcactctgccctagctcctcagcagtgcctggagttggtaggacattggacggagtggaagcattgtgcacatggcatggatgcagccaggtcttgaccctcagccccaccataccaggcatcttgtttcttcactccacaaggatcctcttagcagggcccacactccaccagggacaagaaaggactagaaaattttcctgtaggtcaactcacccagagcctgagcagagaaagcagcagcttctcccaagcatggactcttccaggagagatatccttgcgggatgcttcacctgctcccagttgaccaagaggctagagagcctgtctttggtgtgcaggttcccttaatacaccatggaatactatgcagccataaaaattgatgagttcatgtcctttgtagggacatggatgaagctggaaaccatcattctcagcaaactatcacaaggacagaaaaccaaacaccacatgttctcactcataggtgggagctgaacaatgagaacacttggacacaggaaggggaacatcacacaccggggcctgttgtggggtggggggaggggggagggatagcattaggagatatacctaatgttaaatgacgagttaatgggtgcagcacaccaacatggcacatgtatatatatgtaacaaacctgcacgttgtgcacatgtaccctaaaacttaaagtataataaaaatatatatatagaaagaatttttatatcaataaaaaaaacttttctttattttcaacttctcaatgaccacacgctcctatatttcccaaactcccctgccctctgcaagctatctccagaccttcccaaaaggtggacctggaggtttgaacaggtcctcattagcacatggctttgctccttggtgtgggcaggattcttgttaactgcagtcgggactgtgtgcagcatgcttaggccaccccatccatgggtcacccctgggctgtctggtcagtcatgagtctgccctcatctcctcttctcttctgtggccatcagggaacacacctggctcaacctccccttctttatgtactccccttctctctccccataatctctgggggcctgtccatattcccttgaagtcactaattccaattagaatcaacactgaaaactgctttataatctattccacttcagaattctcccactgaacaatcctctacactcagcaattttcatgtttttgacttcttattcctagggcagaaaatcagattgatccaagtcatctactgagatgccctctcctggttctcgaatccgcctccagctaaagggtggagttccgtggagcaaaagaggctgcctcacagtgcctagctagcaggggagctgggcagggagatgtctcccacaagtctgcacagggctatctctggtcctggggccagcgtgtgcctcagcatttgtcttttacacataagtggggtgggggaaacccacttctttataaaggcttggaaagaagtagagctccactgtgcaaactcagccacataaaagcaaaactagtccagaatcctcccctgcttcagtgtcctgaaacttcacactctcctgagtttcttgcacaccttgaggtctttgggttctttgaatggtggcccaagctcaaatgacctcagtgaagcattctatgatgccaagtccagggcaggttttatttatttattttttattatatgctgtcttacagccatgacactttcttgaagagccactgtgtctttacatttacacgttcctcactcaatctttttctcacccatcacatttctattgaagccctgttagttgctcttccaaagatcaagccactgcgttcacgtggtttacaatctagaggaggggatagggcagaggcctgtggaagagagtgctgtttcatgcagattggtcagcgaggcctttctgacaagttgaccccacagcagaagtctgaatgtagtgaggttgtgagctacaaggatacctggggaatgaaacttctagccacaggaaggagaatatgcaaaaggtttaagacagggctcttttggcatatgtgaaaaacagcaaagaagttagtatagtggaagctgatgctgagtgagtgagaagtgactaagagtcagacaatctagggccacataggattctactgtgaaagacttgggggccatgaaagagttcccacagaggaggagtaaggtctcacctcagtcttcatgggattgtgttacttcagtgctgacagcaccagttagaaggtcattgtggtaatccacttagaaaacaatggtaccacttctgtaatcccagcactttgggaagccgaggtgagtggatcacttgagttcaggagttcgagaccagcctggtcaacatggcaaaaccgtctctactaaaaatacaaaaattagctaggcatggtggtaggcacctgtaattccagctacttgggaggctgggaggctgaggcaggagaacccagtgaacctgagaggcggaggttgcagtgagctgagatcataccactaaattccagcctgggtgacagagtgagactccgtctcaaacaaacaaacaaacaacaacaacaacaacaacaaaacacacaagaaaacagtggtatcttgcagtggtaatgcttgggttggattttgtctttttgaggtgggatcttgctctgttgcccaggctgtggagtacagtggtatggtcatagctcactgcagcttcaagcatctgggctcaagcgatccttccgccttagcctcccaagtagctgggacaacaagcacataccatattttttgtaaaggtctcagtatgttgcccaggctggactcaaactcctggcctcaagcagtcctcttgcctcagcttccgaaagtgctgggattacagacatgaatcaccacacctggccagaattgatccttttattgttttcagctactgatttgaagaaatttgttacagaagctaacatgaatttccctgactaataaaagcagtctacagaacagacagggttcctgccttcagggaacttactgcctagatgggaagacagatattaatcaaaagtaatttcttgctcaaaatccaatgaggattagacagctgtcttaggaggtttcttccaagtggtgactcagggattcaggatctttctacattatgcccttaacatcttggattcttccaggtccatccaagggaaagggggaaagagagtaattcaagaaaaagtatgagctagagaatattgtaagagtgttttaggggcaaaatctagaagaggtgtgcatcacttttggacatcacatttcactggacagaatcagtctcatggactcaacctttctgcaaagaagcctgggatatgtactcatcctagaaggcaaaatagttcaagggatgaagccaggcaaaagtgcagcttcagctgaagtctagccccagcctgatctgaaactccagagagtgaatagcatcagaattgtcctattctgaggacagggtctagtcttctgtactcctcgtcagtcagttattggcctttgagcaccctagaagaagggtataacttccaatgtgtttcagaaaaggcttcccgtcagctaaggcaagggttctcaaccaatgcttggagatatttttgcttgtcaaaactgggtgtgggggctactggcatctagtgggtagaggctagggatgccactgaccatactacaattcacagactagaccccacatcaaaaaaaaaatctggacccaaaatgtcaatggttccaaggctgagaaatcctgagctaagggcagtggtcaggagaagaggacagctatgagcttctgggagtcatgctctatgaatttgggagatgggtgcacaggccagggatctgggtcgggtgcccacagtgcctaacctatggccacagaagaggaaataggagtgtggggcctctagtcaatcttggacacactgttcgactccagttctagaacagcaccttgcacgtggtcagcacccctgacagatttgggtgaatatgcatttttacaactcctgggctccaggctggcacaaaccttcaacctagataactgacatgatggttccaaagaaggatgcctgggaaaacaactctgaatagggcagcctgatggaagtggttcttctgacaccaggatctcaggttgtgctatgcgatttcttctcttatcctggcaattttagtggcaaatgctatgtgattggggctgctttagacttcagagaggagtactagatttagctgctgagacctcaattctgctactgaattataatgactgcatgagcagaccaagtcttctcaattttaggacgctgggttcttccatttctacaagaacactgtgcacttccatttttcttcaactgcattctaaagcattctgggttctctgtgatgtcagtgccaacaaggtcacttctgggggaaaagaggcagaggtgaggggtgaactatcccagcccctgtataggcactaaccagagcagccccacatttagctgttttttaaaatatacattagggttccacatgagatttttgttccatataaaaattctgctgcaaaaacttgaatacctgtgcattggatgacatggaagttaccatggggaacagagacgtagtgcctgccctagggacttacatgcatgtgttcaccacaggccataattcaaggctggaagagtgagggatcaataaaagagtgcaaggaaatttgctattccaattaacaggattatttgcatatatccatttaatttaacagtataaactccgctgtgacagtttagaaaattgggagttatccagtgtggtgccatgcaactctgccataaaatcatttctcttctgatgatccttttgtttcttactattaggagctgcaagtggtgagggagatataatctattgttctataactatccacttgcccttgcaagcctttcacttatgaccaaataaagacaaggcctgatttctgtatataagcttcttaaacttggccaggcagggtggtggttcaggtctgcagtcccagcactttgggaggttgagttaggaggatcaattgaggctaggagtttgaggttagcctgggcaacatagcaaaaccccatctctcaaaacaaaataataataaattagccaggcttggtggcatacacctgtagtcttagcttctcaggaagctgaggcagaaggatcacttggacccaggagttcgaggctgcagtgagctataattgtgctgctgtactgcctgggcaatagagcaagaatctgtctcaaaaaaaaaaaagaaagaaagaaagaaaaaaagttcttcacactcactataagttaagcctcaaaaattctattgacttgaaaatggaagccccattctcatgggggtcactaagatagaaagagaaggatatacccaaagagccgttttctcactggatgcgagaccagagctaaagccctcctaggctgcctacattctgaccctcattgcattgtctgggcctttggaagtcatcttttttgggatttctgagcaggatcctaagaggtgctcattttagctgaagcaggatttaagaaggctgccacttagaatggagattagggttgggtttgccatcccagatcaaaacaacagaaaagaagaaatagattaaagaactccatggtttatgttaaaattgttgaactgaagccatgagacagacattgtctagcaagcagacgctgcgggcctgccttaaattatacaacctaatgtcctaaaataagcccagattcagattccaccctccttggtctgtctctctcttttcttctctctctactcatttcacctcattttattcttacaagcatcttaggagacaggtttatttttcctcccactttcagagtgaagaaaccgagacttagagagactgagtaacacgttcaaggtcacacagctaataggttcagagactccatcaagattctttccaaatagagattccaagagccatttctgtattaaataatcagttcgctcctcgtttgtggagcatgaaaaccctttagacttgccgtcttttgtgcctttgctcaagaaggccatgcacttggatagctccatttcatccccatgaaacccatctttctagaccagaggtccccacccccaggccacggactgcttactggtccatggcctgttaggaacgggctgcacacaggaggtgagcagtgggcaagcaagtgaagcttcatctatatttagagccgctccccatcactagcatcaccacctgagccccgcctcctatcacatcagctgcggcattagattctcaaaggagcaggaaccctattgtggttccaagatggtggaattgagctatttgggttgaaccatttgaagttgccagtaatctgccattttgtaacctacctattgtgcgagggatctaggttgcatacactccttatgagaatctaatgcctgatgattggtcactgtctcccatcacccccagatggggctgtctggttgcaggaaaacaagctcagggctcccactcagtctacatgatggcaagttgtgtaattatttcttcatatattacaatataataataatagaaataaaatgcacaataaatgtaatgcacttgaatcatcccaaaaccatcccctcccccatctgttgaaaaactgtcctccacgaaaccgatccctggtgccagaaaggctggggatgctgccctagaccatttcccagggcccttcctcagacaggaaatgactccattgttacaacctcattttgaaccgttgtgacgtcagctgtatccacctactgtgagaacctctgtttattgcctcacgacacactggtctctaagtttcctggaggccagtgttgtgtttttgtatttaacacagggccccatgtgcattctgtaggtctgggtaacgatggtggaattgagctatttgggttgaaccttttgaagttgccaataatctgcccttttgtaacctataaaaactgtaatttcatctgattcaaaataaataaatcacatttttctgcattggggtttatgacattaggaaatgattctgaactttatacagtgatatgtgctcatttgaatatgttcaagatactctaattataacatcctgttttagggatgctatgatttagggaatcataggttttgctcttagggttttctgtttgttttagttatttttaaaaaattaggaaaagagtcttgctctgtcacccaggcaggagtgcagtggcaccatgatagctcactgtagcctcgacttcctgggctcaagcaatcctcctgccttagcctcctgggtagctgggactacagtcatgctccaccaaacccagctaatttttaaaattttttatagagatgggggtctcgctatgtttcccaggctggtcttcaatctcgggcttaagcaaccttcccacctcgaactcccaaagtgctgggattacaggcatgaaccaccatgctcagcctactttttgtgttttacgttcaacaccttaaaatgttaaagatacacagaaaagtagagagacaggtctaatgaagacctagactcactccttacctgtttcaatgattatcaaattcatgaccacatttgcttcatctctatcccacccacttcccctctccttcatcccaattattgcaaagcaatataccaaggtatcaagccactggaaaatagttcagcatatgtttctaaaggaaaaggaatcttttaaaaaataaccaaaacattttaaaataagttaacaatgtcttagtatcatctaagatgtatacacacacacaagcataaaatcaaataaaatacaattagacaagctatactttgtttcagggagggagtaaggtccacacattgtgtttggtagatatgcttcttatgtttcttgtaatcttgttttccttcctagctagtgctttaatcaaattagttctctgaagtgtcccattgactttggaggaaactgaggccccaggaggttaaatggttgtgcccaatgtccccaagcaagtccatgactctgaccagggatggagtccagatgtttgagagtgttcaactttcctgccccagccccaaggcccccgcccaggcccactgaggagggtccaaccccgggtgccccggacccatcctggggtcattggaatgccctctgcagatcactacttcctgtttgcctttccatgaggcagtgaacactgctgtgaaaaaggttcaaagtgtttcctgacacacaaagcctctaaaaggcaatattttgatgatttaagtataaatgatcagaaacatgtggatttcatttcctttagaatacacttgggtatgaaaattaacaggaaacgtgcttggcaaaatacaacctgggtttcctcaaagccctgaagtggtttaagatgttcagtggatttgaagggaaggtagccttctctctgtaccttcccaccaggcttgcactcgcccacacattaaatctgggcaggatttgctactggtgtggccttgaccttgttgagaaaggcagggaggaagagaaacaggagaaagaggagggagagtctgggtaagaagtaggcagcttttcctaactggtgctgccttcccaagagggggacctgacctctttccttggaaacagccctcaacaagtccctactgggtcctacctgtcctcaggtgtccagccatgctttggccccctctgtccctttccctgagaaaaaccacttggagttacagaaagacatggcacactccacagagaggcttctttccatctttacccgtgttaagataaggttcattccatgatagaggtaggcagcttcagagctcccagaagtcccagagcacaaggcagtgaaagatcctggtagagcaagaggagatggagaaggagaacctgagggcaggagaatgctctggagggagagaggagagaggaggaaagggaagaataaacggagtcagaaaggaaggtaagagagggatagggagactagagagggagaaaagaagggaggaagggtcgggggagggaagaagggaggaagagaagaaagaagagaaaaaagaggtgagagggaaggaggaagggagggagagaaggaggggagacgggagaaaggaagagcagaagggaggaatgagggaaggcaggcgtgagggagaaaggaaaggaaggagagggaaggagaaaagaaggaaggaagaaaaaaaggagggagggagagaagaagggagggaggaaaggagggagagagaaatggggggaaaagaagaaaagattggagggaaggaggaagagaggaagacaagaagggatgggaaaagggagggagggaggaagataaaaagaaagggaaaaggggaaaaagggagagggagaaaagaagggaaaaaggagatatagaaaagagagggaggaagagaagaatggagagaggaaggaagaatggagagaggaaggaagaaaggagagagaggagggaaggagtagagcagaatagagggaagaaggatagcaggagggagggaggaaggaagaaaagaaaagatgtggggagagagacagagaggaaggaaggaaaagtgtgtgatggccggtgggaagggtagacaaaggatagacacagagataggcagtggattcctggttaggatttctggctctcaagtaatgtgcttgtcagcaagaatgtccagaaatgcccctttaactgggcgtactgcaaaaagtgtgagaagcattctgggagtgggtgggtttcacgaactggggtagtcttcctcactctgcttttttgttttaatcatcagtcagcagaaatgtctccagaggccttgctgcttgccctgattaatgaacttcagatctttctgtgccctggggttctgcccatcatgagcactgggcgggatcctaacaccatcactcctgggaccagttttcataagtgggcctgctaggcatctgcaggcagggcttggccacctcccaggagccaggccctgctatgaggtagcctgaggacaggacagaggactggaccacaaaggcagggctttccctcctggggacacacccaggacaggaacacttttcctggtggaactgtgtgggcagaaggggcaacatgaccagggggcaactggaccagaaagacagggccaacaggaccagaaaggcagggcttaccctcctaaggacacagccaggacagaaacacttttcctggtggagctgtgtgggcagaaggggcaacatgataccctcagtaatatgcctgcctgggtcaagatacaagtgacttggtttggggttcccctaaaacagagcgcaagataaggctttgagggcaaggagtttatgtagggggtgaccacaggaagcacagagagggtggggagaagtgagacagagaaggaagaaaagccaataaggtcttgttagtgaggaagttactgcagtgggcaactggggcccaacagcacgggtgttcctctggcagacgctatgaagaatgcgcctcagatggtcccacagaaagataaggagctgaatgtgcatccaccacatcctgtcccctgctggtcaggtggctcctgtggctgtcacctccctcactctctggtcctctccccagcatgctccctaggccaatgtagtaagttatgagcttaaatgggaactatcttcaagctgcttctagagtatgctcagtagatcttggatcccttggataggaatcttggcagggtccctataccagtcccacccttgaggaaaacatcgatactttgcccagatgaacaggctgaaagctggtgagtgaagggtgccaagtagcagaggcccataattgcacctgtcctggcaagagatgagcaatgaacagtttatcaagcatcgcccagcatgcaccaagcacttatgggcccagcacccattcaagggacttttgctccctggactccagcctcttctgcccaaggcaagagagaaagaactggaaaaatacctttgctctgggctttgcatggcctggatcaggttcacagctaattagaagtaaatgtgaagcacaattatgtatgaaccttcggtggccaaattcatgaaaggaataacgggtatatgtttcctttctgtagaattttaacaaacaagtggcattgtcatccattatttatcttttttcaattgcagtgaattgttgcagtgacaaatatccaatttctgtatttacagaaaactcacacatgtgtagatcatggtacagtttcatatttactgtataaagtactgacttgtttttttaaatagagaaatttggtaattattgctctatttcttaagatgtgaaagatgatgcataataaattgataggccatttcttttgtgctcccgtaaaaaaaatagccagccagcttctccttggaaatcgtggctctttatatttggggaaacttaacctctagcaggatgagacacctggagagaacacactctaggcacacagcagatgagcaacaaatatatgtttataaaatttgttggttgacagagtcacggagaactggtattgtttttaaataccccaggcagggttgaagacacaccttgaaatatacactgcagtcttgggcccttagcattggatgaccacacagtcatcacttgttcacatcttcaacttggttacagttttgtgtaggattgtgagaaaaaggagcttgcaggactgaaggtaaaaacctgcacagcatcgtaagacaatcctccaagctgactgagcaaccatggctctcttacccaggcttcttggcctgggagaaatgaagtgtattagtccattctcacactgctaatacagacatacctgggactggttaatttataaaggaaagagatttaactgacacccagttccaaagggctggggaggcctcaggaaatttgcaatcatggcagaagtggaagcaaacacatccttcttcacatggtggcagcaaggagaagtgccgagcaaaaggtggaaaatccacttataaaaccatcagatcttgtgagaactcactaactatcaggagaacagaaagataggggtaaccacccccatgattcaattacttaccactgggtcccttgcacaatatatggggattatgggaactacaattcaagatgagatttgggtggggacacagccaaaccatatctgtacctccaatgtcgcttcattcattcatctgttctaatggaatctactacaaaagtcagacgtgttgattgctgaggaggcacagcattacacatggccttgttctccagagactcagggcttggagatcaaacatagccatggacggaagctaacagtggaacgtgttcaggatgatggcagagtctgaaccaattgtacgtagcaggtgagcaaaggaaggaggggccataaggaccttcaagctcttgcccatgagctggcctctcttcttctcttatgtgatgtgtactgactaagtgtggctcagtgtaagagaaacaagtagatgtcaaagtaacttgtgttaaaatgattccatctatttcaggagtccagttgtcatttctaagcccttgtttacagatgctttctcttgagtccagtaacatgtgaatactatattctgtgagttcttgcttttaaccccacttctcctgagttccctacatttgtaaaaaagaaaaaaaaaaagaaaaaaaaatcaaactaattagataactgaaccacatgtaccttccctaccctgaaaagaaaattgagccttctgaacttgtcatccctactacctcatcccatactctcattttcttctttacattctagcaacaaattttcatatacgtacacaaaaacaaaacaaaacacaataacaaacaaaaaataataataagagtaagagagagtgcttgaaggggcaccagctagaccaagtgtgtgggcctccaatttctcagagtctggcttgaactacttacagaacagaggtccttggggatcacacttgggtctgcctgtgactatagagctccccaggatatgagccccggaccaaaaacagccttttatatgaacccatgggctccaccatgaacctggtcctaaaaattagcctcttgattttttctttattattatcatttttttttttttttttactgagcagctgctatcaatgacttctcaagttttgctttctggtaactaccattccaaagcactctaaaaaccaattttacacttaataaattttaactattcaatatttttcattttaaaactaaataacagacatttaaaagagtatttcttttttaatgacactcatgccactattttagaaagtcaggtgacattcaccatgcattcctatctccttaactgccaaatactctattagtcaagtttgttcatatttacaagattttttttttggatgttttactgctatcagaagatctaacatctgtttctccagggattctccatgtgttctgtagtttacaacaattgaaaccactgttttcgaaatacatttggattaaactcaatgtactaagactcaatttcacagggagccccatgcacgcgtctggggttttctctcatgtaatttttccgaatggtgagacatttgctctggatttaggtgggtgagatagaataacagtggagttcaatggagtgcatgtgtaaaataacgctgttaaaggcccaagtgtggggagggtttctgggagtccctgtttctgcctggagcacaacagaagaaagaaagctcctttgactttgctcttttgggaaccacagtggcaggggcaagtccagcacatcgccttgtgtccttccctggccatcaacaacaccgtccatagacctttctgtggtgatgggaatgttctacatctacacttcccaatatagtgttgccactggtctctggcagcaatttagtgttgaaatatggccagtgagactgagcagctgagatttttattttatttaatattttaaatttaaatttgaattctaatatccatgcacgactagtggctatctgtattagttctttcttgtgctgctaataaagaaatacctgagcctgggtaatttataaaagaaagaagtttaactgacttacagttcagcatggctggggaagcctcaggaaacttacaatcctggtggaagaggaagcaaacacatccttttcacatggcggcagcaaggagaagaatgagtgcccagtaaaggggaaagccctttataaaaccattagatcttgtgagaactaactcactatcacgagaataggatgggagaaaccacccctatgatgcaattatctctacctggtccctcctatgacacttggggattatgagaactacaattcaagatgagatttgagtggggacacagccaaaccatattactatcatttcggacgatggaggtctacatgcctcagctactctgagatgtgtctccactgaaccctctcttatttctccagaccatcaatgtctctgatctacactccttcaatagaacaaattacaccactggtcccaaactgttgactactgtgcccagtgtcagtccatatgccattgttgtacagaccagaaaaggggctcttcctaaagctttcttctctcaagtattagaaagtgacataccgacatgcaaattcaccagggcacagatataacaggcaccccataagcatgggcaatgtgtgtggcctgcccaactccaactgcacgtacttgtcctgttctccatgtggtttccaatccttggatgtgtacacagcatacagactgctgacagcatgcagactgctggcaccatgagaacactcaccatcttcccccaacacctcacggtaacaagcagaggtccaaacaaaccacggagtcctgacaagaagctgactgctctgacaatcttcttcctgacacagaagtccatttcgtagtagtgtcatttctgtggggtcttcctgaagaatcatcatccatcatttcctgtaggatatccctgtgtgccttcagatatagggaatcagttacaaagccccacttcagcctctgctttgtggaacggagatcctggagtgctgtgaccagcttaggcattgtgttcatgatggaggcagaggtcaaagggtgcaagccaaagtacacaggactctgcaggtctaggcatggggtaactaacatgccaccacttctgctgtgggttttggccaaagcaagtcacatggggtgaagaagaacaccctaactttatgagaggaactccaaagtcacagagcagagtgcatggacacaggagatggaaaggagcgaagaactggaccatcgttgcaatccatggctcacaaattctaaagcaatgtatactgagaggtgaacactggatgtcttggcagcaagaacgtgaatatgggtgattgttattatctttgctttatctatattttatcatttcattttacagtgtcaaattatagaataggtataatttaatcttaataagggaaatagactcatgaaaacaatctggaaaatatagaaaagtagagggggaaacccacctaaactgtgtttttcaccaagatggttactagcattgtgagtgagacacttctttcttgctgaagactgtctcgtgcattgcaagatgtttaaaatctttggttcctggacatccaatgccagtaatggcttcttgtcatttttgcaaccaacttcaccaccaccgccacccacatttctaaatcacctccagaggcctccctcattgagaacacagaaaaccacatttatctttttgatgtggttactctttggcttttacgtgcatgacattcattcattcactcattttaaaaataatcgtatggttttacttatttattgttcattgttttccattgatatggtacaccacatggataatgttgaatatagatttttaaattcctatttaaattaataatgtacagatgattctgcatgtcacctaaatggccgaaagtcttctgatcttctcacgccatctggcctttaacaagaaaacatttttaaataggtacctaattggctgtaaaaagtccattgcattccccaagacttttcgtagctttctaaggtgagggaggggtgcctcccttcttgttgctatggctttagtcactcccttccatctctccccatcatcccagacacctctactatctgtttcctacagccctgccctctttccccaccacttttcgtggacacctctcttctcatttatttatccaggaatttcttactcaagtcattagtaggtaatagactgttactacacatttggtgataatggaagatcactgctgcatggagctggaaataaccccaaagtgtgtatcaggaatcacagctgctcaagttcaatggccactatgtgttttagggcacacttcaggtttgcagggagtacttactcgtaactttcttgcctgcaagttttgagtcaatttagacacgctccagtgagggaggaagatatcggctaaactgttggagaacatagcttgaatctgcagccaaagtcagcattctgatgcgttcccctcaagctgacaacctgcgagttcttacccagcctactgcatggaggattgtgacctatttttcaggagaggctggttatagagatcacataagggcagtttctttaacacattaatcccacctgatagaaaaatactgaccagcgagagtccaactcttcctattccctatcagatggatctctctcctttctgaaggagagaggaggacaaagatcccctgaatttctggtgagtccagcgctcttttttgtctccatcccaccgttaaactgccttctcctttattattttcatctcttctccaacatccagtgaacaatgcctccctcttcttcctctttctggccacagaaaaataaaaatatttattgctttgaaagtcacatccaatctgatcctgagttactgttataccttaaaggaatccttgtcaaagatgttgaggaaattcttccatatttcattagtaaaagaaatttataatttatacacacaaacacacacacacaaacacagacgtaatgttaaccaaaaaactctattgtgtttccttactcttgtacataaagacacctttttaaaaaaatgcattgaagatgaaaaacttataaaaatgactagtgaaaaataaacccaaagattcagggtatgagaaaggcccaagtgcactactgatactattcaataagtgagcctttgtataagagatgaattaaactaacagactaaggacaaaaaccactctgttccaacttcccaaaaataatagaaaaatattttaaaacaaaattaatagagaataggtacatatggacagtgcaaaacaagaaaatgtggatcagcagaccagaacatgtgaggaattcctagaagacagaaaccagatgggattagagtgacaagagtagatgaatctatagccaaaaatcataagcagcgtgcaggatgaatccccacatggccttggctcacccagctcttccccctttctcacttgtagttctcaaaaataactatagaaagtgctgggaatgtaacatcctgagataacgaggaactggctagaacagagcgcgggctgttcctgttcgtcctagaacacgatgtccttcagcgcgttagcccagaaactcaattgtgcctgggtataaaacccagggcagagtagccttttggggtccgtcagttccagggcaatgtaatgtgagacattgagataagactccatctgccccaggagcagatttcctgagccctaggggactggctcgccttgaattccagacacggattttcccttgctggctatctgtaggtaataaagttgctttaattaatttgctatgttagtcttctgtctccctagacttgtgcaagtgatagaataaccagtgactagtgaatctactagagaaactggggcttacacggtgaatcctgcttcacacaccccacagttactctgaagctaaaaacaaatgcaaagaaatcctaaagcccaggttagaagactgcaattagagcagcttccaggaaattctctcctgtcccctgtcccaccctctatgcaactcacaactgaacgtctatcagctcagtccatgaaatgccctccaaggaaagtaaaccttctggtcggggcttagtagaaggggatcaccagaagtagtagagggaggctgaggaaatgccaagtgtttataatattatacagttccacaattagtaatgtagttatcaatttttatatgtttgttgttcattgggatttctctataaagtttctgttcaaatacgttgttccttttttattaggttatctttttaaatttcatttttgtttttatattttttgagatggggtctcactacagtgccaggctggagtgcagtgatgagaatatggctcactgtagccatgacctcccaaaccaggcacctcagcctcctgagtagctgggactacaggcacacaccaccaagctcagctaattgttgtatttttagtggagatggggtttcaccatgttgcctaggctgaacttgaactcctggggagaagtgatccacctgcctcagccacccaaagtgctgggattacagatgtgagtgacaatgagtatgcctatgtgtcttttttctatatatatttgaaataattctgtgcatattctgggtaaagatcatttgctaatttgtgttgcaaatgtggcttctcatttcataatgtctcttctaagttctgtatggtatgtttaatttcctaattttaatgtggtaacatttaatcaatttctcttctttatcattagtatattttgtatctgtttaagaaatatttttctgcaccaaaaccttaacatatgctcctatgttattttttgaaagcttcgtagttttgcttttcatagttagctctataatccagatacagtttattttgtcagtggtgtgaggtagggattcaattttaattctgtttccatataaatatctttgaggtgggaggatcatttggggccaggagtttgattccagcctgggcaactttttgagaccctcatctctacaaaaaatttaaaaatgagctaggtttggtggcgcatgcctgtggtctcagccactcatgaggctgaggtgggagaatcacttgagcccaggaggttgaggctgcagtgagccatgatcatgctactcactccagcctgggacacagtgagatcctgtctcaaataaatcaataaataatatataagtttataaaaatatgaatatctttattgtctagggacatttatttaaaaatctactttatcccattgctcttcagtaatatgtttatttatgacttttccattctattgtgttgatcttcaagataccaaagacttattatagaactagtgtgatattggctacagatagataaataaataagtcctcttaccactttcttctccttcgagagtgtcttggggaaaaacacttggaaaatattgagtctttcccacccatatttttcaatctttattatttcgtttaaagtatgatttagcaaatagcaaacaggtggcctttttttttttttttttttttctttgagatggagtcttgctctgtcacccaggctggagtgcagtggcacgatctcagctcactgcaagctccgcctcctgggttcacgccattctcctgcctcagcctcctgagtagctgggactacaggcacccaccaccatgcccagctaattttttgtattcttagtagagacaggatttcactgtgttagccaggatggtcttgatctcctgaccttgtgatctgcctgcctcagtctccgaaagtgcttggattacaggcatgaaccaccgtgcctggccacagatggctattgttttttaaccctgagagttgctggccttcatttactccagcaattgctggaatattcatttagggcattagtccattttcatttagggcaggcactaatacacatgatttcagctcctccatctaactctgtgttaattgctgcttgcatgctgtggcatcccctttccttatgttgcttgtttgatcatgtttctgttcatttcacttttgcctttcctattaagaagttctacagtactttcttttacattcatagcgaatttccttcttgttcctttattcatacacatattacttaactattattttatagtaaattagcaatttttccccatcaagatgcacttccattacaatgtcttaatttcctcctacctcacaattccttaatgagagctgtagaacactttgatgtcccccaacccttcccatgctctatgccttcttattgcttcttacatgatctttgatattattttttccttccctcctctctacctattgctgtatggtagaatttattgaactagtttacctattaaaatttctgttaatttgtgtgcctttccctttgtgtatttctaaatataattaaacttccatatatgtgcatgtgtgtgttgaatattttatgtttcatatattagtcaggttcactgatcactactctttttattcatttttattttttatttttgagatggactcttgctcttctgcactcggctggagtacaattacatgatcatggctcactgcagcctctacctcccaggctaaagtaatccttccatctcagcctccgagtagctaggactactggcatgtgccaccacacacatataatttttttttgtatttttgtagaaacaggatcttgccatgatgcccatgctggccttgaattcctgggctatccactactctttcttctttctttcatcttgtccatcttaattttttcattaaactcttttttataggtattctcctcagatgagatacttaggtgatgtactttctaaattcttgagtacatttctttcacacaattatatttatgatctattcagtgggcatagaagtttcagtttgtagatcttttctcttacatatctgtagacacagttccactgtcttctagcatccagtattgcagatgaaaagtctaatgtctctaatttgtgctttctacttcaaagcatgaatacatatttatttttctgtaaaatccaagaatcttatcacataagtctagatatatgtttgtgggtatatgtgttttctcatcaatttagtccaatctgtttaagtactttaaatgtgcagatatttctcagttcagggaatttacatattcattctattttgtgtttaatgaatgcctcttgtatatctgctttttcttttcccataacttatttcattcatgttagacctcctagatttatccactaaccttatttttttccaccgagtttataatctctttttacttttttctctgttctttcaaatacctcttgatcttgatctgtgttactattaattcaatcttaatagtaacaaattgcttatttaatttatttactattttttagttcaaaactcatgtttaaagccctgaaagtattttatactgaaaattaatttgcttaaattccacatttaaaaaaaaatcaagatattcatcaatctcacccagcagtctcttttactgggtttgcatattaattattctgctcaatcttcttcattaaggtttctgggcatttttaaatgggacattattattatttatgagtttatagagttgacttagcttgggctgttgcaggaatcctgtggatgataaaagacatggtgaatgctggccctgaaagcctggggagtccaggcagctgtcacctgccattaaggcacctagagagatcgctagctctctgatgtccttaaacatatccagccgtaagttcagggaggtcacagttcaccagcagcttactctttgtcctttaagaatgtccataggcaagccctcccaggacattcctgtcctcctccggagctctgttgctactgtttggttgcttgtctagcatctatgcttcctgccaggtctatgatattccaaatactcacaccaccaagctgaatcctatagaacccagcagccctgtgctttaggagaggccagcagcttggattaggaagtgggggagggaaaagagcactggattcactgtgtctacagattcgccttgacatcatttgccagggtgttccaaatcatccttcactgcaggtacgaattcagtgggacaatgtccagggattttgcacaaaaagaatttcgaatccagacatttatatccaaccaagcaattattccattgaaagggaatagtaaagatgttctgatttgatcttttttatctgaaaaattgttcagacaatgtaggagaaagttttcatgactttgggttaggcaacaagttcttagatatggaatcttaactatactccataaaaaaaccagaaaaattggacatgatcaaaattaaaacttttactccaagaaagacactactgagagagtgaaaatataagctacaaaatggaagaaaatatttaaaatcacatatcccataaataacttgtatatagaatatataaataactcttaaaatttgacagtaagataagtactcaatctttcaagtgaacaaaaatcttaaaaaggcacttcactgaagagaatatatggataacaaataagcacataaatagatgtttgacatcatcattcatgaggaaaatggccacagccatacaatacttcatatttatttgaacagctaatatatataatatatacaacttatatatgatgtctacacaatatgtattatatattcaatatatacaatgtgttcaatatatacattatatcatataatgtgtatataatatataatatatcatataatgtacatataatatatacaatataatattgtatatatacagcaatctatattgtatgtctattatatatacattgaattatatacattgtattatacaaaatattatatataatacaatataaagtattgtatatattatatattgtatatataatatataacatgttatatattatatacattttgtactatacattataatgtataatacatattatatatgttataacatgtaatataacatatattatgtaatatattatataaattatgtatcagacaatatcagagaaagttcaccagttacactagaatgtttgtacattgctattgagtatccaaaatgatacagccactctggagatacatgacccaccaatttaacatctcaacatttactgtagagaaatcaaacttacatttatgtaaaaacttgtaagcaagtttatagcaactgtattcacaatcaccaaaaactggaagcaaatcaaatgttattcaatttgtaaatgaaaacacaaaccatgatacagccacacagtggaatactattcagcaatataaaggaatcaatgtaaaaagattaatggctttcaaaggcattatgctgagtgaaagaagccagtttcaaaaggctgcgtactatacaattttatttatacgacagtcacaaaaattcaaaactacagtgatagagttcagtggttcccaggaatgaggactgagagactgatgtgactagaaagaaaagcaacaagggagattgttttgtgtgtgatactgttctgtacatgtatggtagtgatagttacagaaatatatatatgtgttaattttttaagaaatgagcacacacacacaaaaagtcaattttactaaaaatttgtggtggctacatgaatctatatctatatatatatatgttaactttcttagaagtgtgcacacacaaaaaagtcaattttgctaaaactgatgatggctacatgaatctatatatgtgtcattaataatgctttttataaatgtccacacaaaaaagtcgagtttactcaaaactcatttcaaaaagaaaaaagtaaaataaaggcatggtggatcaaacctaaagctatgccttctgactacttctagaaatggggaattgataacacagaaggaatacaattaaaaatataatatgttttccagagctgagtttttaaagtactttgtacaataaataaaaatatatctacatttagacataccatatcagtatacttaggataataaaatgtcaaaacattcagaaagtgaaataaaacgtcctttacaaaggagcaagcattagcctggcatcatgtatctaatactttatactgggtgcaaacaaaaacaaaaacagggcaagacttttaaagttctgggagtgtggttagggaatctgagccaagtgagagagaataataaagatattttcaggctgcatggactccagaaacacctcaaagacacttttactttggaagtcatttgatgactgtagcaacgtggagtaaaccaagaaagaaagagatgtggactccagataacagtggatccaaactaagaaatggtggatgttctatttcaggatcactgcaactcccaagcccagagagcacccggttcagacgcagatggaaagatggtggctgcagaggaaacgaaaattggagggttatgtggaatgactgagacactggaaaaactggggaatatgctcaagacgactagtgaagctggttgccagggtttgttttgttttgcttttcagaattaattgaaacttgactgtgggtacattcttccctgtgtgagtggcttaggggtcatgatgttggactcctggtgaaagaattgcatcttaatattctactttgttctgctgtcagcaacttttatataatcataataatggaaagacattgatcagcctttgacttgtaaaatcaccccatagacaaatcacggaacgtataacttattacagtgcaaaatgtaaatgtgatgaatcttgacaaaataaaagaggtacatttgaaagaggttgggaggtgaaaattgaagaggttcagagtactaataccttcattttacaaagttggaattaagaatctacagttgagctaataagaaatgatgtagcatctaagagagggattctgaaaccagactgcctgggtttgaatgtcagctctgccatttattagccatgtgaccttgggcacattacgtaatctttctatgctcccatttcccaatctgtaaaatggggatattagcagtatcttcttcaagttgcttaatatatgtaaagcacttagaatagtgcttaatatatgtaaagcacttagaatagtactgtatatgtgtttgctatgagctcagagatgaacaatagaaaaactggtaagatgagtgacaaaagtaaacgggaggaaggatatagaaacataatatattgcaattgagcaaaaaatccaatccaacaaagaagttagtagacaatgtctacatccaagaattcgaaaatggtaatttacaggtatcacaatagtgatcagatttataaaatggtttatttctggtaaattaggctgtgatttggtgataagagtgaagtcttctgaactgttcagttattcagccatggagatgtagtcttttgattttttgttaaaagtatgtggctggattaataatataaataagtcatctcactccagttagaatggcaatcattaaaaagtcagaaacaacaggtgctggagaggatgtggagaaataggaacacttttacactgttggtgggactgtaaattagttcaaccactgtggaagacagtgtggcgattcctcaaggatctagaactagaaataccatttgacccagcgatcccattactgggtatatatccaaagtattataaatcatgctactataaagacacatgcacacgtatgtttattgcagcactattcacaattgtaaagacttggaaccaacccaaatgtccatcaattatagactggattaagaaaacgtggcacatatacaccatggaatactatgcagccataaaaaaggatgagttcatgtcctttgcagggacatggatgaagctggaaaccatcattctcagcaaactatcacaaggacagaaagccaaacaccgcatgttcttactcataggtgggaattgaacaatgagaatacttggacacagggcagggaacatcacacactggggcctgttatggggtgggggtctgggggaagaatagcattaggagaaatacctaatgtaagtgacgcattgatgggtgcagcaaaccaacatggcacatgtatacctatgtaacaaacctgcatgttctgcacatgtaccctagaacctaaagtataataaaaaaaataagttgtctaactgctaaatcacttttgtgatgaaattgaacaaggaaaacttaacccaataaaatgaaaggaagcaatacaaacaaacaaaaaatcatagtaaacggaaaagattaaataaggaggcgagaaataatcggatatttaaatatttgtgatcactgaatggactaagtggtcctatgtgtcagccatgaaaactcgctgcatgggagcacagtgggtgacagcatcaccagtggcctctctgggtcccccactgcgttccctccaaggccacctgagcctcaggcagctctcagggatacacatgcagtcccgtttttacaggacatgaggtttctctaacaggaaatttggctccaagtctcaccttgaccaggctggaactttcttggatctgaactgcagtcagagactcttcctctccagtcattccttccccttctgcttccctagtggtcagacctattcactttcaaaaggccctccctgacttctgctttcgactttattctttacttgcactcttcgaataaacaacatgcatgtcttattccttctttgtgttaactttttgaaggatccaaattgacatatcctaccagaagatatggttctctgatttactgattaaacaagatccagcatgtagctgtcctcagggatgcaactgaacaaaactgcacagaaaggctgaaaataaagggatggaaagaaaatgcacaagatagaggcttacacaactaaaaaggaaaatgcagacaagtggagctaataaaaaaaaaaagaaaaaaaagaaaaaatgcagcaatattgatatttaaacacagaaactgaaaaattcatgatcatagaagatgactttaacgcaactatttgagaaaatacagatcaaatcaacagaaatctgcaagaatatggagagtgtgagcaaaacaaataaataagcctcagtgatatacacacaaacacactctttcataaccctaaactttttaacactcacagaacatttacaaaattgtattatgtattaaacccaaaaattaagataaattacaaacaagcagaaatcattcaaaccattgttctctgaccataataaaactgaataagaaattaatattaaaagaaagcaagagtgtgggctgtggggtggggaaaagcaacaatccacttggaaaaattatttaagtaactcttgatttaaagaaaaaaactcaagtcattaaaaagtcataaaaagcaataaatgctataaatgtcaaaacatgtgggatataaccaaaatcggactcagaaaaatatatagctataactgcattttttagaacctgaaacaaaacaagttaaacaaaagctaggtataaacaaagaagtattaaaaaaaaaaaacagtaaactctaagaaagtaatttaaaaaaaagaaacacagaggaaagtaattaaacagaacagcaatatgaaaagcacaacttaccagtgaatccaaaagccaaatctttctatgtcaacactgaggacaacagtaagaaagtggacggggccaggactgttccaccaaatgcccctagagtgatttccttgatgtaactcatgtcaccattttcactatgaatgtgggtgcctcataacgtgtgccatttatgcaagactaattctgtgttcctatagtgttgctttcctccattgcattaccttagcacctttgccaaaaaagtcgatttaacatatatatatacgtgtggctgtattttttggctctcattccctgttttgaaactttgctttcaaatgcatacacatttagaattatttcctcttggtgaattcactcctttattattttatagtgtctttcttttgtcattgatagtactctttgttttaaagtctactatgtctgatattaatgtactcactccagttttcttaagatgaatgtgggcatggaaaatccttttcccattcttttatttttaatcatctatgcctttctatttgaagtagttcttttgtagacagcctatatttgtttttagtagtagtgctctttatataatctgacaatttcttctgacttttaattggggtatttaagtcaattatacttattgcaattatagataaatttaatagtaccgttttgttagttctttttgtttcatctgtttttttcctctttatgcctacttttgaattcagtaattttatgatttcattttatcttcactatttgcgtattagttacgcatttttaaaaaatttttagtggttactctatggtttcaatatacatctttaatttctcaccttcaaataattttatactgcttcaggtataatgtaagacacataatattttcataattgcttcctcctttctttgtgctattattgctgtgtattttcctttttaaataaatttcataatacattgttactattttcacgttagatagataattatattttagagtggtgaaaataagaaaaaaattccatttttatatttacttcatggttgctgtttctagagatcttcatttctatatgtagatccaagtttctatctgatattacatttcttttgcctgaagaacattaatatattttgtactggctcctattggttaactgtgaattctctcaggtttgtctttttcttcctatctggaaagtgtttatctcacatttatttttgaaaggtattttagctggatatagaatttggagttaatagcattgtttccaatactttaaaaatgcctttcgattgttttctagcttccttagttactgaaaagaatgctgctgtagtttccttctttttgaaaagcgtcttttcttttcttgctgccttcaagactttttctcttttttcatttttttttttttttttggcagtttcacagtgatatatctaggaggggatttttgtccttatcttttagaattttttctgattttttgaaattcttggggctttgatttggtgttcattgctaataaaaaaaaaaaacttgaccattatctcaataaatacgttttttacctcaccttttgtcttctatggcattccatttgtatgcttatttaacagtttgatattatcccgcaccttttaaatgctttgttctgatttatttttcactcttttctcttccttttgtgtttcaatttgcataattttattaaattgtcttcaaattcactgattcttctttcagttgtgttgagtgtactgatgagctcattaaaggaattcacttctggtatgtattttaaaaaatatctagtatatccgtttgacttttttcttatggtttccctctgacggcagaaattcccccatctaattacagatatgttcatttttttcccactggatcttttatacattaatcactgttattgttaaattgttatctgatggtttctacatctggttatttacgagtctgaccatgagttgcgttttgttttctgctgtgtttttgttgagactgtgtgtgtatgtgtgtatgtgtgtgtgtgtctgtgtgtgtggtgtgtgtatgtgtatgtgtgtgttgatcttttatatatcttgtaatttttgcctgaatgttggcatcgtgtgtagaccagagatactgagataaatagcatttattcctcaatatttgcatttttcttgttttgtttggctgctagtacggtttgagtcaatctagtcagaaattggttttattgttgccatggttaccctccatgcacaatctttaacttccattagtaatgggttgttttcattttgtgcttgagtgcaggctgatgagcctaaatacgtttctcagaattactgctacagcctcagattttaaacaatctttgctcacctgcaccacaggaggggtctctcaccattcttttgcctcttctacagtggtagagtgctgttgcttcttttggtgcttgtcagataagtagtaattgtcaacgaggcttctctcttgtccttttccagccttaatcttataaaagtcttctgtgccgtggcacaaaatggcaaataaagacataaaactacacccaactttattagtcattagagaagtgcaatttaaaaccataatgagataccactacatccagaactaaaattaaaaagcctgagaataccaaaagttgaccagtatgtggagttactggaaccttcatacactgctgttgacaatacaaagaggtacattcacttggagaaaacagtttgggactttcttataaagctaaacacatactgaccatataatggaaaaatcccttttaggtattttcctaagagaaatgaaaatatactttcacacaaagacttgtttcatatatgttcatagtagctttattcctaatagccccgaacgggaaacaactcaaatgtctatccactggtgaatgggtaaacaaattgtagtatagtcatacaagagaatattactcatcaataaaaaagaaattactactccccataatatagaagaatctcaaaagtattatgcggaatgaaataagccagacatataaaacttctttatattatataattctgttgatataaaattcccaaatacataaaaactaatgaaagcagttgtttttgtcatcatggtagagaccacaaaaacaacagctttcatggtagagagagaatttactgtaaaggagcctgaagaaactttctggagtcatggaaatattctacatcttgatgttggtggtagttacaaaccatgtgcatttgtcaaaatttatcaaactgtatacttggaactggtgaattgtgttgtatataaattatacccagtgattaaaagtaaaaggtgaataattattccagttgaataaggggagcaggcataggctgggggaagatctatgctcttgaacccttctttagctgaagcacttcttaggaaccactaaacttccatacatctcagtctgaaaatcagtggcttagttttccccacttgcacgcacttgaaaatgagagccagaggggatgtgaatttcccaggtcgtatagtttaataatcagctctaggattttaaccagaattacataaggaaccaacagaattttaaggagagaatcaattgtcttttattcattgctttcatcttctaagtaatttatgattaccaactatatatatgacataaagctgctattggagtgatatacaaagaaaattcacatatttggcactctgcataccttcttttgagaattgaatttcacatgggatttatttctctttctcaggagtgattcagactgactgcaaaagtatgtcttttacagcaacaacaacaaaaacacatagagattcagttatgaatttgaccatctgcccctggtcaaatctccactgcgcacaacacactcagattatcagtgacaaaactctctggatgagtgtgctttccttggagctgctatgaaaacaaagggtccagggagatgttgggatgcagccaatccttgggggctggtaggtggacaagtgcaatggaatttgagattagggaatcccactcaccgcttcttgcaggagggaccatctcttttctggagcttcaagtttacccaggaagattatcacaggttcagaaaactgttttattttttaaaaaatgaccattttgggattcgcttgccttttcctctttccaaagaggaatcattcttggaggctctgacatcagcacccctcctactgctccagcacagccattaatcacccatcaaattcctgccttatttccttttggccttggaaattgtatgtcttttcttttggccttggagattatatgtctcaagctttcttggttgcttcttttttttcccctttctttttttttggctttttttttcttttatgcttttattttttctttctgagagatgaggactagggaggagaaagccattgtcaattaatagagagacattttcaccaggtgtttctcaattatcacattggcagccagccccttctgtgtaaattgtactgaggaaaaaaaaagaaagaaagaaagaaaaacacctctcagtacagacattcccctgggattgtaaccagctctgtgtcttctttcctcggaaggacagtcatcctctgggaacagccctgcttagaactataagcaaagccaaggctgtctcctgcaacatcatgatttgaatgtgttaaagtgtgtgattattattaggtcttaaacattctagatttgctccctcattccacacaagtttcagaaataaacccgcaactagtctctaggagagactgatgcttattctgtgtcagaggcctggtccccagacgtccccataaatttgtctgctggaagaccataaacataattctgagcatggaagttatttagatttgaattaattgccttttcagttgttttcaaatatgcaaattgaaatagccaaaaaaaaatgtacattaaaaaaaaaaaaagcagtccattctcctggagagattctagaatgtcctttgccaaggtgatctgctttttgtcaaagcagactaaaaggcaaaggtgcattttttgaaaatggcccgtgtatgtgtgggtatttcctcctgctctgacattttcttagtggggtgatcaagtattttgtgttggtcagagcctctttgacttcaacaagccaccacaaaatgaagtaagattattaaatcaactgtggatagtaaaagtgccttgatcagctcttggaggctgtaggaaaatgattttgtaaagaacgctgaaggagaatgcaggaaaagacacactcatcatcactaaaagtcacctaatgacacaagctaggcaatcggcgttcttctcatcagtaaggtcagaaacgtctctgcttacagctgttatgacccagcaccctggcttcgatggagacctcgagagacctcttggggggaacatggtggtttatctggggacacaacttgtaaacatccctcatctaggaatttccatgaaacctcctgagcttggagagatgcccagcttgtgccaactcctgtataacaagctccagatgctttctctactccatgccaggtgggattccctgaggtttgcccttaacccatctcctcaaagcccaaagtcagggatggggcagttctggggttagacacttgcacggggctgcattgcatttaccccatgccctgctccaataagtgttcagcttctggttgtgtccattcatagtctgcccagacagggtcaagtttagcgaggagaagggacttcccctctctctatgacgtcactaatcagtaatcacaggtcagctggtcacatgaagattcagtttttgagcagatgtgagtgcaagtcctgagctaggaaatacagaagtcggagaaaaatgtaatcttaagctcatctctttgccttaggccagttccccagaagcacagcctgagatggaattctggggctaatgacttattggggaagtgctctcaggagaagccagtgagaggtatagtttggggcaagggaagaatcaggccaaggtctggttgtagctgaatcctggcctcaacttgagtgcactggaagttccgggagggtgcacagtcccaggttagtctgggttgtgggaagagggtgagcctctacacatttatatctgtctgtcatgggctatggatggcctgcaggaaggagatcacaatctcccagtgtctctaggcaaggcagctcctgagggcaggtctcctgggggtggagtgcatctgggagcacccatgcttttagcagtggactgtgggtgctcaggctcattaataggcatctgggcaaagcaataggacagtgaagatgcagctgtagtggaaaacaagatggatgcatggtcataatggacttcctaatacactcccagatgtcagccttcagctgtgcagggaggggagaggtggtgcccatagagcagatgcttccccagccaggggacacaaggccagggctaaggccaggctcaccccagtgacaaggatgtctgccctgcatctctgccacatgaagcagtgaaatagcagctcttttggcacacaggggaaaagccaggatcaaggtccggcctttcagcagcacttacctgctggagtctttgtgtatcatgccaagccctccctgggagctggagcatcctgaagtcctcagggactcttctggagcagaggttgcaaactgcatgcccaagagatgcctcctcctgtgaaaatcgtgtgtgtatgtgggcatttaaaaaaaaagagcatgagacaaaatttaaaaatctggagatttctcgtaacacctgggcttttaggttttgctgttgctgttttatgaatctgatgtcctcaccataaggcctgaccttcctacctggacgcaggtgtgtggtggctgtgcctttcatgtagggtgtttactctccaggttgtcagctttctggcccctgaaagtgtctacaagtgtgacttcagaatatatgcatgaagactcaagattgacagaggggccaggcatggtggctcaggcctgtaatcccagcactttgggaggcccaagcgggtgtattacttgaggtcaggcatttgagaccagcctggtcaacttggtgaaatgcacgttgctcacctgtaatcccagctaattgggaggctgaggcaggagaatcacttgaactcaggaagcagaggctgcagtaagccaagatcgcatcattgcactccagcctgggtgacagagcaagactctgtcaaaaaaaaaaaaaatcaaagattaaaagagggacacacactgacctttgcaagcacagattgtcacagaaatgaagagaagccccaggcatcagggccttagggtcacaggcagagcgaggcctccccaagaggagaaagaagccaacatggccaagaggtaagacttggtcccagaatgcatgatcaaaacccagaacacaggcccatgtcttcctgtcgtcctcattgctctggcacttgacacgttgttcttgtgctgggccagggtcagtgggtttggcctccacagggtcactcactgtatgacctcatgtccctgcccattgcttctcttcatccagacctcaggttctcttacctgaaccaacactattgtcccatctcccctcagccgcccccttcttctcacctccaacctctacccctgttctatcccagcctccacagtaatctgctttcagctcagcccagatcatattccttccttacacatttttcaggtgcccccaaagcctggggtgggtcactggacatcaccagaggaatctgacccatgggtcatccatgtgaaaggacagtcctgatgtatcaggaggctgcttcttgggaaacttcgggttctgagttaacacagtaaagtaaaaactctcagtccagccaatattctgctcaggatgtgtctatggacaccacaggctctggaaggaataagtctcgggggcccctagtggaggatgtgcatccttggcccacgtcctctgcaccagagctgttaagtggggaaggcaagcagctggagaagctggggaggatgctggagacccatcctggaaaggccctccatccctccacccaaactgcatgcactagaattgacttgtgctctactgggacacccaagcccagcctgcacctgcacatactcagaaacagtgaagcaagaggaacacatgtttgagttctgaaacacacctgagaagatgcttcctccaagcacatatccattatggtgagtgcaatagtgatatcatccaaagaatagaatactgaaaggcacattatgcaaatgtgcattcccaattatggattcatctggaagcttccaaaacttctaagacctcattccaggcttagccaacaaccagtgctacctcagtgattgcgcgaacattacttctaggataaatttctctctcatcaaatgagggaccttaaggtccatgccttgcccaaggtcatgttgccagtggggctgaagggcagagagaacctctctgtgaggtgtggtttcttcctggcagctctctggggaggcctgaaactctcgtggcccagggacaatgctgttggatgtggggtactggcaagtactggcattggtgattaatagataatgaagctcaagatcaggggatttcagaaatcttcccaatttcgggcaactaaacttcaatgtataaattcaatctaatccaagaattttttttggaaaatgatcattataaagtccatttgcaagaataaacatcagaaactgtaatgacaattacaaaattaaccaaacctacagtaataatagaacaaacaaaaaagaaaagaacggcaagcttgctgtttcagctagtaaattgcaaaataaagcttcagtaattagggtgaaatgcaggtcacaggttaacatagtgcttttgattgtatttggagtcaccccagagtttaagaaaaatacggatgcatgggtctctctctcaagatgctgatttcattggtctagattaagtgagacctgggcttcacagtttgtaagtgctctttagattattgtaatcagcagccaacggttaagaacaactggattaacagaagggaatcaactggagagactgtcaaaaatgcgtgttcctgtatctgggtccactgtttcaggctctgagaagggatctatgaaaaataaggcatgcaacacatatcaaagttttggaagcactggaaagtccttatacaaaagagagtccttatacagttctgcatacatgtaggcattcagtagattctaaagttgacagctcaaaacaccgaaggagagatatagcaagggtgttagggtaatccactagccatttggagatcaagttggatctccagttcacttcttccaactaaaaccataagtaaataggtttaactaacttataatattgtgctggagaaaggcgttctaggctttctaaggaagatggaaactttatataaagaagaaatgtaataaatttaactacctaaatatgaaactaagtcatgacctacaaaaatatgtaaactagaagtagcaaagtgcaaaaaagaaagttgtcacacatattacagataaaacgttagtaatcttaatttgcaaataaagaaaatttaaaatgaacataagccaaaaggaaaacaacaaatgttcagtaaaaaattaagcagtaaacacagagaggtaaattacaaaataaaatgtacagtcaatacattctaaaaaagatgttctacctcataagtaatcaaaagtgctaaataaaaatcaaaatgagtcatctttttcacccatcatattggaaaggattaaaagtttgacaaaacttaaaaatagcagggatgtgggaaaattgacattctcttgcactgttgttagaaatgtaaattggtattcctttctggaaggcagtttgtcaactgaaattaacttttttaaaaaataagaagcatgccttagcctagtaatcatatgcttgggaatttattctaaggagataattgctaagtggtgcaaagatatagatacaatagcattcattaatgcttttaatagtgaaattttagtagcaacataaatatctataaataaatgattggttaaataacctataatatatgtatactaaaaaagcccccacatttgaaatagtgtatttctatagatttctatttactgaaatgatggttctcttttactcctcctccttttgtacacattatttcttctccttgggcggcccattctcccacactttcatatttggttcactcctgggagtgcccaaccaactgaaattgccccttcttctgtgaagtcgtcccttcccttctgagccacataagtagtcaccactcttcatacccaagacatccctttaccattcccattgcagcacttgttcactcatttattcaatatatgtatcaggctctctacagggctcttaccaccctctaaagtagtttactctgccatggccatctttcccactggattgcaaacctttgcagagcaagaaagcgcatgattcattctgttaccccagattttagcttgggacttgatatatgcccagtacaagcttaatgaatgaatataaggaagaatgaatgaaagaaagggtgaatggataggtggatgaattggaggaaggatggatagatgaataaataagtgggtggattaatgaatagaaaaaaggatggatgaatgaatgggtggggggtagatagatgagtgaatagaagaacatggatggatggatggatggatggatggatggatggatggatggatgaaggaatagaaggaaggatggatatattaacagatgtgtgggtgaaaggatggatgaatgaaacaataaaataaaggacagatagatgaatggatggctgaatggatggatgaaggaatgggtacgtgggtgggtagatagatggataaaataatggaagaaaggatggatggataaatggatgcaggtggatgggtagatggatgaatgaatagaaggaaggatggttagatgaacagataagtggatagatgtatgaatagaaggaagaatgggtgaattgatgggtgggtgtgggaatgaatagagggaaaaatgaatgaaaatggatgggtgggtgaaaggaagaatggatggatggatcaatagaataaagaatggatgggccgggcgtggtggctcacacctgtaaccccaacactttgggaggccgaggtgggtggatcacttgaggtcaggagtttgagaccagcctggccaacatggagaaaccctgtctctactaaaaatacaaaaattagctgggcatggtggtgcattcctgtaatcccagctactcaggaggctgaggtgggagaatcacttgaacctgggaggcagaggttgtggtgagccgagatcgcaccattgcactccagcctgggcaacaagagtgaaactctggctcagaaaaaaagaaaagaatggatggatgaattgattggtggatggatggatggatggatgagtgaatacaaggaaggatggatcggtgaatagatgggtgagtaaatgaatggatgggtaaatagatgggtgggtgaatggatgtatggatgaatgaatagaaggaaagatggatatatgaattgatgggtaggtagatggatgagtgaatggatggatggatagatggagactgggtagattaacggatggaataagtgagtgagtgattgagtggtagggaagacagatgatagatgaaagtaaaaggattgggttgttgaggagatggaatagatgcataggttagtagatggattatcagatgagtaggtgagcaaatggaaaggatgccatgttcctcagtccatcttcttgccattctgcctcaggaaggacattcagataactcttatcattaaacacgctttccacagctatgtattgggtctacaaaatgttaaaagttatcaaagctatgtaactgtttgaaataattggttttaccataacaaaaaggaacagaataaaaacccctctaaaacaaaaagcaacaaatttgtttcatggaccttgaacatgttcagaagccaacaggggagaaagaagcagctcagagattatcgacagtaagaacccacttccatgcccaggcctgagtgagaaaggaagagctcagttaccagatccaggagcagcccacagggtggcatctggggccatcctgggctacaccagtgggaggcagttgcagagaaagtacaatcagtacccaagtgagaggacaacacccttgcttcacttttcctcctcccctaactcacccacctgtgcctctcactggccaaacccaatagggaatcatctgacaggggaacctggaaacatgggctccaggtatcagcagagcagggaggagtgatgaatgcatttgaggacaaacaggccaacaactgcacacccgacaaaattgaaatcaataaatatttaaatgtgtccacaatgtcacattatttgtcagccaaacaactgcaaatgaactcttacatatgttatgaataaattatgttgggtgtgtgtacattttaatacagctgatgtggtagaggggaggagcgcctggggacaatgaggccttcaagtgaccctcccaactctcttcttgtgcaagtctcaagattcagcttcctgttctctaatagaataactatgggcaaatcactcagtttccccctctttaaaatccatgtcaattttccaggatcccagtgaaatgaaagtgaaataatgtttgtagaagtacccaggaccccatctgacctgatggaagccatcgttttaattgcttctaaggggcactcagccagccaaaggaggcaggcacaggtgcccttcatcagaccactttgtcatgacataacaaaaacctgaagaagtacatctttctgaaactaaaaatcccacatccatcaactcatggcgaggacatcatggtggacatgggcaatgatttaatgacaaggacactcaccccagcatatttatattagtgcacatattatattcctaattattgagcaggaacgggtaaattaaatgagggggtatcaacacaatggaacatggagcacatatgtgtttttgtatggaaatgtctacaaatttgttttcagctgtaatctctgaaatgaaattatgggtattgttttctttgctttctttgctttaaaaaaattatcagtgatagctgtgccagttcagctgtgccactgacccagcgccacagttcagaaaagagcaatattgacagagcagcaactaaggacaaattacctgactgaggtccttctcagtgatgtcactctgcttgctgatgaactggacgctcgtggtggcccccgggcaactggcactcacaggctggaagagtgggtcttctaatgaatgcctcgagggtcctctgtgcgctgccacctgcatggccaccatctacagtcaacaggtacaaatcacaaaaataacctcccctcctggtctacaaggacattaagaccctggcttcaagaccattcacagggagttatatgcagccatagctaacacacatgtttgtaaaacctttgtattttctatttgcctttagttttttcccccaaaatttgagatagcttcagtgcattcctgaggatcagtacctgctaaaaagactctgaagcagaagttggcggtgaaacccagggagcctcaatcaagtggctttccgcaggcaccatgtgtggctttggtgtagccccgggagcctctttacctctctgggtctcagcaccttctatctgaaaggtaggatggccatgatgaccctggaaaccctgccatggctctaaggtaagataactcctctgattcagtttttagttttagtctgacatagtgaagcaatgatttaaagctctaaagccagcatgagcaaatttttttctgataagggtcagactgcaaatctcttaggctccatggccccgatgatctgtcttgcaactgctcagctttgctattgagcacaaagcccagccatggacaataagtacacaaatgagagtagtcatgttctgagaaaatgatgttgacgagaccacctggtaggttggattttgcttgtaggtcctagtgtgcagacccttgctctaaagtaaactgtttccaaagacttaactagtgactgatggagataattaaaaatgtagacgacggtaatgatgatgaagataaaaataatacaagcctctttacttccttttatgcaaagtgcatgtgtgtgtactaaaaattaaaatagcaccagtggcgatcagcaaaaaaatgtctcctccacccctaaagatgttcattgcttatccccagaacctacctcaccttacacggcaaaagaaattttgaaattgtgattaaggtcatgaacattatcacagagagatgatgttcctgatgatcttggtggacccagtgaaatcacaggagtccttaaaagcagagaacctttctggctgggtcagagagagatctgagcatggacaaaggttcaaaaagaactcactcctctgtggctggctttggacattgagaaaggatacgaagagagcaaaggaattcgggcagccataaggagcaagaaaaggcaaggaaacagattctcccctagagcctccagagaggaatgcagccctgctaagacttcatgctcagccccaggagatggagagaagtgtaagataataaatatgcatcacttaaaccatcaaatttgtgataatttttatagcatcggtagaaaactaatactctaactccctgagaaaaatttggatattacaaagtctaatctcacccataatgtcactacccagagatacccactattaacatacattagaaatattattttagattcctctgcatatatgtgtatgtatgtgtaaacagagaatatatacacattatatataatatatattatgtactactatatcatatatactacatatacacatattacatataatacataatgtttgtatatactacacatgtatttatatactatgtaatataaaattgtcatatatattgcatataatgtgtatatatataatatacattcatgtatatctttatagggagagagatataaatataaaccattacactagtttacattggctgtaattcagattctttttatttaattaaacatttttaaataatttccttgtgccaataagttttcttcaaaaacatgctatagatgagttataattccttcacttctccccttttaattgtttctgattttttcactagtataaaaatgcccaaggagaaaattcatgcacatattaaactgttagggtgctataaggttactattctcttattgccataaaagtatttttccctgttttgtttgcctttaatttattcggggttccttttgaggtatggaaattttgcattttgttttattccaagagatgaatgcttctccattactttttttcttccatggctggaaaggtgattctcagtcttagatttgtgtcttcttctagtgctcataagggttcttgttttcagttctgtctttgggctaggtggtagttattcagtttcccaagttgctaagctgtgtttccgtcctcatttattgaatgatccttcatctttgaccacaactatttgatgccactaccatactccacagcttctagaatgaaatttttttccatgttagtatctcttagatctgggtcacctttcagactccagcacctaaaggtcttcattggcttggcgtggaggccacttcttcctggaaactttgggatttgcttatgctatcatctggggacactatggacctgagaccacttcaggtttccagtctgaagttcctttggacttcacactgcaacactgtaggcattggctctgattccagttctcagggggagacgtattttcttccctccacccagtgcaaaggttaagatgcaagcgcatttccttgtgatctctttctgcgcggtgcttgtctttcttaaggacacttagaccaagaatatagcccttgtcatagtagttctattaaattccaccttgggggtttttcctctgttattggtacataggataatactgggtcataccatcaataatgtaacttatattcaacaaaatataatatattacatataaaataaagtatatcctaagttcagtttctggatcatctagtatatttgtttttcctatttcttgttaattcactagtatgacagtgttttgagatttttaactttaatgtttcttttaatatctggtaggacaatttcttcctaattactgattctttctaaaatgttccaggctatttctttcatttgagattaatattagaattaatgtttcaagttctcacacatcactcacatcagtaaatgaataatttttttaaaactctgctgaaatttttataggatcttcattaaacctacaaataagtatgggactaattgataagtttacaatattaaaagtcaatatattttctaatcaaaactatttgatcatcttaaagaccttttatatcttttctatcattaaaattttataattctaattttttaatatttctggttaatgacattctttcccagttattatatattctaatgttactgagaatggaattctgtttttcttaaatttctgtttgattatttttcacatacgagacagttaatggtttttgtatttgattttgtaactacctttctaaacttgcttaatcattttcaaatatattttcataattttaagataccatcaacttatattgatcaacattttaaatactttaggaaaatcagagaaacattgctacattaaatacatgcactgattgtacaatgcattctgatgttttaaaaattcagctccttagaatgaagatgtgattttataagcagaacaaccatcttatagatatataatgttaataccattctgtcctcctagtttctcctcttattcctcttatttctacatgctatcattgctgatattatttttgattttaatgagaaggcctctagtgcagtggtttttaattaccaaatttttctttagtatgggggaggtcagaggccttttgaaaatctgatgaaagatgttcattccatcctccagataaagcaaatgtgcactcacaatctgacttcctgagccttcaaaattctctcaaccgtctctatataggcttccaccaatcgccaaagtccatgaaacctggttcaggactcctctatggtattacctcttagacgaatgttaaatgttaacatcgattacatttgcttggttaggacatcctctttattcatcctctttatttctttttttttctacataaagttagtaattagtgttggattcttttcaataccattcaggtatcgcagtaggttgtatcattcctcccatttcttcagccttctctgtacccatgatttacagtgaaaccttacagtttcttctgtgagaggaagagtggatttttctgccctgctgttattgggaacagatatgtgacttgcttaaatggtccaaattgcaggttgaagccaggctgagatgaatccagcttagatcagctgacctccagctgacccacagacatggacagtatacatttttgttgtttaaaacatctgtattattcagggttctccagaaaagcagaactgataggagatagatagatagatagatagatagatagatagatagatagatgatagatagataatagatagatagatagatagatggatagatgacagatgatagatggatagattatagatagacagatgatagatggatagataatagatagatacatagagagatagagagagacagacagatgatagactagatagatagacagatgatggatatataatctatacatagataatagatagatagatagatagatagatagatagatagatagatagatagactgaccaatgagaagggggaattggttcatgcaattatggaggccaagaagttcttttacaggttatctccaagttggagaatcagggaagctggtagcatggctcagttcaagtcctaaagcctgagaacctgggagttgatggtgcacatcctacagtctaaaagcaggagagcctggaggtctgatgcccaagagcaggagaagataggtgtctaaactccagaagagagagagggcaaatttgctgtttctttttgcttgatcaggtcttcagctgattgatggagtctaccctaactgagtgagagtggatcttccttactcagtccactgattcaaatgccaatctattccagaaacaccttcacggatatacccagaagtaatggtctaccagctatttgggtatcccttaacccagtcaaatgggcacctaaaattagccatcacagccactgagtctggggactgttttttttaaaccaacttttgcagctaaccaatacaggtatctatttatttaacagtgtagtatcattccctcgccacataacagactgtcatcatctcagtgactcagaacagcacatgttttccatgggtcaggtgtccagcacggcttagctagaccctttgctcagagtctcataaggctgcaatcaaggtaggagctgggctgtgtttctatctggacttttgagttgggaaataatacactgctaagctgaatcaggttgttggcagaactcattcccttatggctgttttgccaaagtcttgttgttgttgttgttgttgtttgtttgtttgttttgtaagccgtagaccaagaaccagtctcagatcctagaagttgccctcaggtccttgccatatggcctcctctgtaaagccacatctcacaacaaggcagcctactttttcaaagccagagagagagagagcatgcttacctctgttgaagactctctgccagttaggacctcctgattaggtcaagataatctcttgatttattcaaactccactgattaggagctgtaattacatctgcaaaaccctttcatctttgccaaagattctattgattagaagaaagttacactttccaaccatagtcaaaaaacagggattatataatttcattgggggtcatcttagaattctgcctaccacaatcttgtatttaatatgcttaattatattaatatgttaatgtaatatttgcatgttaaatcactttgcattcctagaacaaattatgtttggttataatttataattcctttaaagtcctgctagtttttttccatgggtaatttcatttgtacttttgttctcctattcaaataagagattgatctggagtttctttgccattctggtgggtttgatagcaaaaagtgaaactaacttcataaaacacatttggaagtctactgtatctgtcagtgttcagtcagggaaacagaaccacctcaaatatcctgacaataagaatgacttgtagctgccttcttgtctttggtttcacagggggtgtgttagggaggtatttttggtgttgaaactttgggatgtaatctagtgggtagtgctcaggtgtattggtcagctaataggctcttgctcagtcatgtggctccactatatttcctcatagttgaagccatgctccctctcaatgctctgaaagtgtgggctcctctcccacttcagtgctggctgtagatagtggcatgacactcctgggctgcccacttcagctctggggtgatctcagggtttatggttcttctccaccttggaggcagcaaaggaagggatcttaatagtggttgtgaccaagggtctttgcgtgtctcctgaggacttcaccccagagagatgcaggtaagcgattgctcagtgcaatcatcccggataatcattagagaaatgcaaatcaaaaccacaatgagataccatctcacgccagtcagaatggatattactaaaaagccaaaaaagtaacagatgctggtgaggatgaggagaaaaagaaatgcttatacactgtcagtggaagtgcaaattagttcaaccattgtggaaagcagtatggtgattcctcaaagagctaaaaacagaactgccattcaacccggaaatcccattactgggtatgtaaccaaaggaatagaaatcattctaccacaaagacacacgcatgtgaatgttctttgcagcactattcacaatagcaaagacaaggaatcaacctaaatgcccatcaatggtagactggataaagaaaatgtggtacatatgcatcatgtaatactatgcagccatacaaagaatgagatcatgtcctttgcagaaaaatggatggagctggaggccattatccttagcaaactaacacaggaactggaaaccaaatactgcatgttctcacttataagtgggagctaaatgatgagaacacatggacaaatagagggaaacaacacccactgggtcttacttgatggtggagagtgggaggaggaagaggatcaggaaaaatagctactgggtactaggcttaatagtgaggggaggaaataatctgtacaacaaacccccatgacacaagtttacctatataacaaacctgcacatgtaccccaaacctaaaataaaagttaaaaaaaaaaagaatgagcgtttacatggacaggaaaagatctagtaatgtaaagggtgaggaggagtggggaaagttggaggatcagggaagcctttgttgacctcttgagcccggctgcctggctggatgagcctgagcttgtggggaaatctgaaaagcacacacacccagtcactgaagtgggaccctgcagggggagctcattgcagtggacccacagtggaaactgttccctctgtaggaaccactgcctctgcagacctacagctaagcacttgggggcagtcttggcggtgctatgggaagatgagctggccatagagcaagagcaaggtgaggccatgctggggcccaacaggcagctcagcatctatctgtcagcgtgtctgcccacaccaacctctgataatgacctctgcctccttcccaccctgggaagctcacatcaattcctccttggtcattctgggaaatatcatttggggccttagacaagaactgtagtgccaagttgacaaggcacaagtcagtcctacctgtcatgttcttatgtctgagatgatccaggcagcatgggaagatatattccttgaaagactgaaagggcttgcctataaagttttggatgctggacaggatcaccaagaggcaagaagtgggaaacacataggaggcagctcacagggcaagcagggagagggaggattccagacaatcataactctccacctgtaccagggagtgctgactggagctgagtgatccccacagaggtggaatcactccttggagcaaaggacaagtaggtccacactcagagagtgcatggaacgggaaaagctgctttccttcaccatttttacagtattaggctttctttgtcaactattaagcttttcctttttgcttggtttgaggttttgactaaaggcaaagaaaattgtctttaatagaaaagttgattgagaggctaaggcaggaagatagcttgaggccaggacttcgagaccagccagggaaacatagcaagaccctttctctaaaaaataataaaataaaataaccaggtatggtggtatgtgcctgtgatcccagctactcaggaagctgtggcaggaggattgcttgaggccaggaggtcaaggctgcagtgagctgtgattgtgctattgaactccagcctaggcaacagagtgagaccatgtctctaaaaaaaaaaaaaaagaaaagaaaagaaaagaaaagatgacctcattgactttaattgccattttgtttttgtttcagtcagtttattaagtaatatgccactctttcactgggttctttgtatcatgtcttatgctctctgaattatcttttcttcaaatgtttttgctttaattattttaatttacacaacagacaacaattctagcagtagttttctttaaatttagagaaacaaaggtttaagtggtattaactgcttcaaaaaatagctcttgcttcatagttattttaaattccctgtctgataataccaacatctttgccatttctgaatctatttctaacacttgttttatctcttcagactgtgttttatctttctttttagtgggacttgtgatgttttgttgaaagtcagatatgtatggggcaatagaaactgtggtaaatcagcctttaatgtggggatttatgttaatctgagtaggagttgggctgtgtttaatgtttgctgcagctgtaaataacagaagcttccagttcctctagtgtgcttgttttgatctcacctcttgactttggacttccctatggactccacctcagagagtctgcaacatgcaacattttccgttgttatccagtgttacgataaagtgtgatggtaacatgttgtggcaggggaccattctataatctgatcaaatctcagtattttggtggccttgcttctcggggttgtgacctttgcaagtgttgctccacttctagaatgaataaaacagtggtacagttttcccctccaccccctactccctttcctggcttcagtattcccaaaccatttccttgaagcccagatcccagatcctggctgacagtgttccaacctctacccttttttaggtaccataggaaggctggaggggcctgaagtggcagaccctttctctgcctgggatcaagcttcagaatggtgctctggatacatccttttccctggagagaaactcttcgaactggagaaggctctaggtgtatgtcataatgattagtcctggtaagagccatgaggaaatctcaccatgagaacttgttggggtttctggaaactcacagagctgtggggttcttcctaagacttcagcccctggagttgctcattctcacaccagtccactttcaacctccagcaaatcaccaaagcagtcatctaatgatcctgccagtttatgcctcctatggcttcagctccaggcaagcaaatttttgttgccatgtctgtccagatacccctgtctttccaggtctcagcgtggctttgccctgccacctcatcaatgggtcaaagaaaagtcctttcttttcagtttgtccaactttctgttcttgttgggacaaaaacgttgacttccaagctcttttcttgttggagctgaaactggaagtcctcattaccctttaagatagacacaaaaaggaatcttatatagattattttgactaataaaatgcagatccaactgcccattgaacatgttgtaatcggtatctctgggttccctgtgtcaatgttaagtacatctttgtaagtgtgttattttttagaatggaaagagatgccaatcagggcctagggggaaacactgaaagctttggcataggccatgcctattacagtgtgaattctgggcaccttctcctttgtctactcttatgcatcatcaagcgagacttcatggcttccttaaaaaaaaagagagagaaagggttattagtgggatcacagaacaaagacactctagttcatgcatctcatgtgcctgggaaagacccagcaagataaagagacacatgcaaagggaaatgtcagaattttaaaataagcaataaatcattaaaaataatagttatttttcagaaacaattatgaaaaacataaacatagaaataaaccaaaacaagaactgagatgcaaaattgcacaatggcctgttgagttaagaagtgaaggtcagggagaccccatgatctcagagcagcctatgtgtagcatgccttggcattcaggtcaggcttccccaagacaagctaggcgtttgcctaacatggcaagactggagagagtataaggaggaaggaagtaacactgattaaacatctgctgtcccacatttctctcactcatccgtttgctcatttgaatgaattattaaggtcatgctacatgccatgtactgttcttggtgctgctgatagacaaattagtgtgacctggtgcattctcttgcgaagcttatcattcagtgtggaagacagacaggtggccaggtaacaacattccagggagatacgtgctaaaggagaagtctgcagatattttcttggaatgcccttggaggagtctgagcctgccagggttggggcaggggatgccaggcagaggattccaggcatagcatcctataccaggcacatgagatgcaagggaagagagtgagcatggggaccaagagtgaagagtaaaccaggcaagggaagggcctgtgtgaagctccaaggcccagggtgcaggggagcatgacttacttgagaattgttgggttcaacatggataccacttaggcagctgctggtaggtcaggataatgccttcatccccggacaatgggagctatgagaggtttcagcaggacagcctcatggtcaggtttatgcttcaaggagaccatagtgacaattatatatgaaatggattgggtatataagactggtagcacagagatcagttgacaaccccaggcagaagtgagagaggctcaaaataaggattagtagtggagaaggaaagaaattaaagggttgaatacatatcgagaaggtaaaatggcagcacttaatggccaatttgattggggacatgggggaaaggagctcaagtgcatgacccaggtccagattgtaaggaatggagtgatgggtggttctatgtatgaggagcaaggaggaactttgtatgaagagcaaggcatttttgaggggatagggaagatgatgactacagttttgagtgtgttgatgaggcttccagttggatgtatccaaatttggaattgaggagagatctaaacttggaagctgtcataacctagatgaagggatttgaagcagaccctgtcattgccccaccaatactccctggcccacccagaagttgctcacatgtggctgccattcagacctgtggctttctgtgtctctctgcctgagacattctctggttttggcactgcctggcaccagctagtaagagacagaacgttctgggaggtgacccctcaggaacaaccttcagttgttgagggagggacactgttagataaatacccattttctggccccttggggagcccatctgtgtgcattccacgccattgttcctcaaagctgagcccaaccatttcccctggaaagactgctaaaactcagattcccaggccttctccggagactctgagttattaggcctggttgggaggggaataagatttgcatttctatgcacatgaaaaccacaatgagatatcctctcaccctagtgagaatggctattattaaaaagacaaaaaataacagatgctggtaagaatgtagagaaaagagaactcttatacactgttggtgggaatgcaaattagtacagccactatggaaaacagtatggagatttctcaaaaaacttaaaatagaactaccattcaattcagcaatcctactactgggtatttatccaaaggcaaataaatctgtgtatcagagagatatctgcactcacatgtttagcctagcactattcacaatagcgaagacatcgaatcaacctaagtgtccatcaatggaccaatggataaagaaaatgtggtatacatacacaatagaatacttttcaggcaaagaaataaaaacaaaagaatgaagtcttgttatttgcagcaacatggatggaactggaggtcattacattaagtgaaataagccaggtacagaaagataaataccacatgctctcactcatatgtaagaggtaaagaaatttatctcatagagatagagaataaaatgatagataccagaggctggttgggtgtgagggtgggaggaggaaatgaagagatgttggtaaatggatactaacatatggctggatagaagaaaaaagtgctaactatcaatgctaggctagggtgacagtccttagcaaaaatatattgtttatttcaacatagccagaggagaggacttgaaatgttcccaacacatagctactgaaggtgatggataccccaaataccattatttgatctttacacattacatgcatgtaacaaatactcacatgtatcccataaacatgtaaaatattatgtatcaagaaaaggattttttaaaaaatttgcatttctaacaacctctattttgcgatatctctcagcacaaacccaaggggtccttcccagtttgcaggagaggtaacccctgtttaacactcacttcattgactttctgtctttcctatctcccctccctcttatctggcttcttggcatcacactccaaatgaactataggcacccaaatccttgtctgaggtctgctttgggcaaatcctaaatatgatagccactgaggcccctgtcttatgtataataaggggatgcttggggaaactatctcagaattgtcatccaagttgggacacatgggcatgcatgagggacactcaaggtaacacggcagcttggggattgtgcctgattcctgttcccctcttagaaatatttctatcacagcactattcacagtggcaaagatatggaatcaacctaagtgttcatcaatggatgaacggataaaagaaaaggtggtggatatacacaatggagtagtatgcagccataaaaaagaatgacatcttgtcatttgcagtaacatgatggcactggaaataggatattcacagagagagggacagacatttcaacaggcttagaagcctggcttactgactgatatggtttagcagtgtccccactcaaatctcatctcgaattgtagcttccataattcccatgtgttgtgggagatacctggtgggagataattgaatcacgggggtgggtctttcctatgctattctcatgacagtgaataagcctcactagatctgatggttttataaacgggagttcccctgcatatgctctcttgcctgccaccatgtaagatgtgcctttgctcctccttcaccttccaccatgattgtgagacctccccagccatgtggaatggtgagtccattaaacctctttcttttataaattacccagtcttgggtatgtctttattagcagcatgagaatgaactaatacactgatccatgatattaaggtctgtgggaggaagtctcaacaaccatgtggagatggggcccagttctgtctccattcactgtacttcctgctcagtaaggaagcattagttattgttgttgttgtgtagcttttgagacattaataaagctcagttattgttattgttattgttgttgctgttgctgcagcaataatattctgttattatagaagcttcagggagtcagtgttagttattatcattgtcattgttgacatcattctattaggccctcaaggagtctactccttgaggagtggtgcaaaattctatacctttttttgaggagaaggtctacaacttttatcagatttttcaagaaacctcctaagagataacctttgatttagagggtagtttaagtccatgagaatcagtgagattgaatagagaaaaacagccagacacagtggctcatgcctgagatcccagccctttgggaggtggaagtgggaggattgcttgagcccaggagttcaagaccagcctgggcaacacagggagactcatcttaagaagactcacctctacaaataatactttttaaaacattgttaggccaggtgcagtggctcatgcttgtaatcccagcactttgggaggctgaggagggcagatcacgaggtcaggagatagagaccattctggctaacacagtgaaaccccatctccactaaaaatacaaaaaattagccaggtgtggtggcaagtgcctgtagtcccagctactcgggaggctgcggcaggagaatggtgtggacccgggaggtcgaagttgcagtgaggtgagatcacaccactgcactccagcctgggtgacagagcgaggctccatctcaaaacaaacaaacaaacaaacaaaaaactgttagtcaggtgtgagttggggtggcacgcacctctgatcctggctacttgggagactaaggcaggagattctcttgaacctggcctttgaggctgtagtgagccatgattgtgcccctgtactccagcgttggtgacaaagggagacttggtcacacacacacacacaaaaaaaaaaaaaaaagagagagagaggaacagttctgtgtgcagattgctaagtgagcagggtcaagttcacagtctggaggcagcaacacacaatggtgagcaaggagaggtggtggtgtggatggcagagggaggcatgttcataaaagaagaaaactgccaacggtggcgagctctctagagaaacaggcaaggatgaaagcagaccatgctcaaggcatttcaggaggatggcgaagtcaggaggcatcccaggatgacccaggcactgtagggcgtgactgagaagaaagacagccccaacagaagatgccaacaactctttcagcgagagggtttgaggagactctgcagctaaaggagggaggtgggatggtggggagggggaatagttttcaaatgatggaaataaaaacaacagtggaccagaatgttcacaaaagacataacatctcttcatctctgctttaaatatggaaaatgagtctcaagggtgtaaaaaaaaaatgttcagtttcacttaacccattgatatggtttgactgtgtccccacccaaatctcatattgaactgtagctctcataattcccatgtgttgtgtgggagggacctagtgggggataattgaataatgggggcagtttcccccatactgttttcgtggtagtgaataaacctcatgaaatctcattgtttaataaggggtctccccctttcacttcgttctcacttctctcttccctgccaccatgtaagacatgacttccaccttctgccatgattgagacctctgtagtcaagtggaattgtgaacccattaaacctctttttctttataaattacccagtctcaggtatgtctttatcagcagcatgaaaacggactcatacacccactaaccacagaactggaagctggcttcggtctgtctctctttggagtaagctgtccatggcataatatttcttaatagtgtttgtagtcacaaatatccatctttccatggctaccatgctagatcaaattcttccatagggttccttgccaccgtttcattacagctctttctcaagatcacttttcagggtgcaaggaccccaggaaggcgtcattgtaatcaaaatgtgtggatgggtctggcatcagatgtctccctctgacctaaggcaggaagctgaaggcactgggcacctggggtaaagcagaggaagggcccagaaagtggactagacagacagccaccaaagatgcagtgccactggagttttacctcaatgggacttgcagtaatgacacccacgtcttgtttccttcttttgtcgtttgatgtcttggtgaagttgggtcagtgctatgctagtagccttctccagaggtcaggggacctgccaggacaggaatagggagtgagttctaggtccaggcaaagccatacagtgggctgggctgtgacctgcacgtccatctgtggctcacctagggagagcagctgtggttcatgcgtgaatgggaatattgcagtcctcacatcttgcagaagatgctgcagaagtccatcctctgcttgttctccatgctgattcgggctagaaagagcttggtcaccaagacatgggaagatcatgcaagagcgtaaaacagaaggatcacaaggctacaagcaaaaacaaagccaaaatttgaccacagcagaaaatcagctgctaaacgctaagaaaggctagatcctaatgtgtgctcattgtctctggaagaatatatctcttccctatttgagaaccccctgcctccctgactctctcctacaattagggaagaagtgatggggaggacacagacgcaagactgtaaactgagtaaatccctgatgccacagagacaaggtggaagggaggcactgtgatggcaaggtgacttagcaagcccagaaggcaccaggccggctttatccagcaacaatcaacctggtatctgccacaaaaaagtaggaaagaaaatcgggacttgatccaaataaatctatcaagtatcaagtttggcatgaataaaaatgcacctagtgtatcattgacttttgtatatctgaactccaaacctaaccagctggaataccctattttaagtagcatcccattcgaccttccaaaaggaaggcaagttttagcaggttggaagtcagtgccttaaacagtatcttcttctctggatgcaaatgagagaagtactgatctactccatggaagaaaaaaaaatcagaactaagccccaaaagccagaactaagccccaaaagcaaaaaaaaaaaaaaaaaaaaaaaaagaaagtaaaaaaaagaaaaatcagtgtgatggtttcaccatctaaagagttattggcaagttagtggtccatgtcctgtgaccacatcggttctgctttacaaagaatgcgtcaatcctacagtcttcacagctaggaagtaccgggtggttatagaccatcagagcgcacatgagcttgaagagtggacttggtttctgtccaggttttagagctcataatgaatgatggttgccaatatgggctcagacagacctgagtcagatttctactctggggcttggaggcgctcagtaacttgctcggtaccctcccctcccaccacaggactgtgattctgccccggcttgcaggacttggttacagacagatgagataacagctgcagacctcttggctccgtgtctcttcccttgtaggtgctcagtagctaagtagatacccgttctattttcctctaaattttccttacaatttaatcattagcacaggtctctccaaagagcaatttatgttaaagaataattttaaggcattcaatttgattttaatagtcatagctaggctgtgtctagtttgtgattttcaaacaaaaccaaacagaaacacaccgtttaaaatgagttaagctgaaatgagcccttgagtgaagctaagttggatacattttgtatgtcatagaaatgatgggagggaaccaagctgaggtatgttagggatgaggttagagactagaaaagaaaggggagtgaagcaaggggttctggtttgggagacaagaaggctgttttcaaggtagccaaaaggcataaggaaataaggccatctccctgctgtgccctgggccatcttcctctgcccatcagccctgcttgggccaggtgggcaggatgagggtccttcactcatctgtggagccactgcagtccctccagccgagctcttctaccccacccagcttctcttaaatctacctcttgagaccaaaggaaaacatgattttcatccagatgaaagtggtgtgtgtatgtgtttttaactgttgctgaatttcacatcagaaattagaagccctaaaaattaattttaaccaaacatactcactttattctttctcgctacattcatcttttctgtctaatactgctatcacttcctgagaacaagaggagaaatattagatccttcagttttaaaaagtaaaaagccatggacagaagcatgcccttctcctttggttcttagcattctggaacgcacctgtgttaaaatatgaagaaataaaacaaatataaattatgcattttccaacttaatttaaaatgcattatgctttgctttgttctctggaattagtcttattaaggggacagatctgtatggattaattttgagtcagtttattcacttctttgtaattcagtggcaagaatttttgtccccaggcatcaaattaatttttttttttttactgtaagtaaaacatacaaaatgtagacctctttgtgttatttctttgtttacctggcatgcaacatattctcatattatgcttccaccaaatctgaaatcttctccctttaaacaacaaaactttacccacaatttttaaagcaatgtaacctttgtcacaatattggagttgaacacaataatagcattattctctggttgtattcatttctattagagatcttcatggcctccctctaacccaaactcaaggagaccagcccccaagcccctgcctccccaataattttgtcaacatgtgaactgatattttatggctatttaaaatgggtactaaatcatcattcttaagtattgttttagtacagtaattctttgttctgcttcgacattttaaatctttatatttttcctccctacacggagcaagaaaatcgtctgcattcttaattagtcttctttaaacaaaatatcctttcatatgcactaataaagactaaggagccttaccctcttgtttaaataactgcttgctgtagtataaaattgtaagagaaacgatgcagatcaagttgcgggcttgaagtggggaagaggaacaagccgtgccataataagcagattttaatgatttactataaatcagcatttttgccctgtcagtgagattgaagaggcagacagctcctcacatgtctgccgagcaaatgccttcctgatgaatcatgtgcactgaatcactgatcacaacattcaaacggcacatccaaataatgagggaaacatatacacaggctcccgatggctgctccaaggcagcaggaatatatgtttttccgttgtgtggtggttaaacccctcgcattgatcctccgaggactgcatggagggtaatagaagtgtatattacccggttaaccgctggtgcccgaaacacaggctgatctccataaatgctctccccaaccccctagactttcgatgaggatctaatctggtcttgaggagaagggaggaaagcagaaaaaataaaaataaaagacaggctgtaataatgaacttgaacgtaaagaatctggctgcaaaacccaacagaaattggagctaatttctggggactggtcttccgatatccccctcccaagcctctgcccctgctgtttgcttcctctgctagtgcctaataatccccagtggtagtgcttccggtcggcaggatcatctctggggagaggagtgccactcttcttgttggaaggacccatttggaaactgagtatggaggaccccccgacaggacagtggtccagagagccaggcccctagagcagactctgaggccatccctgacctggacttggagatgttcaggaagcctttccagcagaccagaggctttccctgatggcagccttcagggcctcactcctctcgaccgccgcagcccaacatcggcagctctctctggtgctgcttgcttcttgttgtctttgtaacactcatcctcatggactgtggcttcctcagttgcaaaatcattgttttaacttttttggaaacccttaaaataacttgcacatagtacaggcttttccatcatacacctacctccatgagtaatgaatgaatgaatgacagccacagaggccgggtattggccggccacactgagccggctctctaggacacctcactctccgagaaaacgaggacgtccttgagcctaagacaatcaatttctctttgccaaatcctaacctcactccctctggcatccaaagccctgctttggggccagctgggaatctacgagccctggtcccacccgtggacttacctggctgcctgactgcctggctgctgtggggaagatctccaagggaagtcccagctcaaactggagaggaaaagagggaggcctccaacaccagggcatttcacactgcattctcgtacgtaccccacattacatcccagtggtgctcccggaacacagatggggccccacagttccacactttctgcctctggctggaatgcccactcctcccctatttaaatatacgtattgtcaaaaatagagctccccttcctccctgaagccctgtctcatcttgtgcaatggaaataatctctcccttctctaagcccgattatgcttcagatatttcctttgttcattcattcattcaatcaccctgcctcacaccaggagatgcctggtctcttctggtaatggtgaaaagaagagtgccaccctacggggtggcggcggctgcaccgtccattcttcagtgtgcattgagcattcgctgtctgctaggcactgttctgggcccggtggtgacctagttggggctggacgggtcctttccaggaggtcaccaatccgtgctatctgtgtcctcaatcagaatcctgcacttaaaagggcctttccctggtttactgctctaatgtcaccatcacattcgtaacattcatgaaattcgtaacaatttttgaacaagagggcctgcattttcattttgtgaaatactatagcagtcctggcttttattttgaaggacttgaattcagggtgggggatgggagggagatgaaaataaacaagtaaacgaatgaacaagacatttcagatgtctctgtgtgatgggatggagagttgaaggagggctacttcacatggggaaattaaggcaggctggtgtgaggaggacttctgagcggagttgcatgtgatgggaagacacaaacataacaagcatgagataaaccagttaaccccatgaatgaaatgagccgattaaccccatgggttgcttcagtgacggctcaaccttttattctgttctggatgcttggactggtgggtgccttccttctcccaccctagagggaaatttttgggacgtacaggcccctgtggccttctcccgtagccagagacaggcagaccattaatgccaccaggaacaaggaggaacaccctggtgtgtgcactctggaaccctccagaagtccctggaaccctctggaacagaaacctcaccttcctcctcctcccctggcagcctcagcccctaggccccctgggccttctcggttcctctgtccacctgactttgcccaggaatctatcttccataggagatgcggggtcctacagacagccttgagaaactcatgcccaggaggtgctctgtctctgggcctaaggtttagggaaatggtgcagaccagccagtgcttgtgaatttcctcttctccttgggtctctagcccctggccccgctgtggtgtctcagagcaccctgatgggtttgcatcacagcctttcgcagcagccttccttggccaggtaagttaagtatgaattcttttacacaggactcatgattcctttaggtctctgtggagaacgggagtgaggggaccagggccagagctctgccctcccacaatggcctctccctgtcctgttcaggaacctctcctgccatttgagcctcaggccagctgtctcgtggagaagacagagaaccaaaccacccattatcccacctggccaggaggacttgagatgacagattagtgcagcaccaagcacagtggctggcacaagagacccttgtcacctcctccaggctgtcttccttcaataacaggctccgttgtcatgcttgggtactgccacagcagtcactgattctctactgtggcatgctcctgatgaaattcaacagttgggacaaatgggctagaaagaaacctctctgagggcagaggccttaggtgccacaatgcttacctggacctgatacccagcaggtgtgcagggaaaggtatgcagaagagaaggaaggggatggcatggcatgcacagcggcagcacacaggctgtgtgtgggcagtgcccaggaaggaggtgcgtcaatacaacaagggttgacaccaagtgcagtgcagttgaaagccacaatgtaattatccacccaggaaaagagggtcccctcccatgggactgccatccatgtgaagagaaggaaaataaactcattcaaggtcaatttaaaggttaaatggaggtcaaccggggggaactgagaccatccctgtcaatgggagcagtcttggccacttacttaggactttaacctttggctttaacattcatctgaaaaaaaaaaaaaaagtgaagcagataagtgggtattagtagacataccattttagccatcttagaaaataaaaaataagagtgatcgtggatccagtggcagttactttagaaagatagtaatgtgtaattcccagtttctcagactgtaacttctgcacttaccactaatttctccactgctccaattgcagtgtatacatttagtttacaatttatcatcaccgtttgtgtatattacgccagcagcataatccatcctcatgaagctaatgctcagcattaggaaaatggactccgtatggagcctgccagactctggcctcaacacagaccgagttgcaggttcctgggcccccactccccccaccccagagtatatgtggcgttatgttttgtgcactctctccaaatggcacggtctgatttctgcaagttgctggtgtccattgtctgtggatgtaaaaatcaatgacctacatacgattttgattttgcactgggaattgagagagagagagaaagaaacattgagagagagagagagagagagagaaatgagatgagacgcaaacggaaaataatgaaacagtcatgttaagaaatatattagcatgttggactcaaaaaatatatttccaagaggatatcctttttttttcttccaacaggaacatatttaatttcatggtcatttgattaaaacagttaattgtattaatgtgttattgagctgaaagtgctggtcattccgggatggacgctcactcgggcgcagagaacaaaacctcgtaattccagggctctttgggagctggtggaactaggacctgctattgaaacctctcagtggatattcaatccttgtttttattttcttaaaagagagagagagaaaaaaaagcctcaaactgctgatttctgcagaaaaatctgcaaatgaactgttctattagcacaaacataccaaagtctttagaacccctctcttcaaaagcataattaggtatttatttcagacatactaacatctttgcagtagctaataagatgcagcccatttgaatattaatataataaatgattaaattaaacagcaagattcagactcagaaatagcctttataggtcccagggggtcactaaaactgtttccatttcttcctacagttaacatagtgcaagggacaggaatgcatagagcaatatttgtcttatgaaatgcggagttttatatggtgctattcagttttattactccacagtttgaatctggggcccagagtgaagtcaccatgctgtggtctgacagcccctcttcctgtctcactgcttgctggcattccagagacgctccactgcttggcaaagagtcctctctgatagtctccataccaataggtactcatggagctgggcacaaggtaaactcacaatatgattaaaggaaacaaaggcaaaaccccaaaaccaactgacgctgcataccaaactgcccagggtttattttgtgtgtctacgtgggtgtgtttctcgattccactgagctcagtgtgtgtgtgtgtgtgtgtgtgtcggggggtgggtagcggggcaggctgaaaggccacacccaaagctggggtgtgggctgaagccagatgcaccaggatgtgggcaggctcttcatctctcaactaggagggacccccgcccacccacttcacgcgcacaaaaaagaataggcaaagtccacaattataattggcgattattccaataaaggtataaaggtgtttccctttttaaattagttcatgaaaactgcacagtctccaaatcccatgaacctgagatgtgttaataaacatctggccatggtttttgcttaattagcattctctagtttggacggaagtctgtttatataaaacaaaacacacacacacacacatacacagattctgttttgtaagccacagcccctcagaaatccaaaacgagcctcccctaatgatcggagagagatttgggtctttccatactcctatttgtcaactgagcagcagaagagaaaagatacttggatctgcatgtctaattttattatgcaagtctcagatccaatatctaataacttgatatagtcatgctgtttgaaaatattcacatttttggaatagaagatattgaagcttgcaggtcagcttgcattaaatagaaaacaacacaaaccaacctcaagcatgtccacggtccacattattattatccacagccaaaaatctccccgccctatctctctaaggagcagcgtcggcagggaggtaatggataaaccataacccggcttgcaaggctttactgtctaaattagataaaagaaaagtaggaagaaaactcaaagataagtggtacaaagtaaatcaaaacaaatcatcttaccaaactttattcacatctgataccatttttagaaattaaggtcagttttgtggaactaataggaagttatacctatatatcttggacaccatgacaatgccggggtggaagatttatacaccatggttgcagatgcagaagaaagatatgagagatcaaatggaagtgcatgataacaaatgaaaaatggtccccacagcccataaattaattgagaaaagaaggttgtcattatttgaacatgctttaaaataaggtatggagtccagatggctgaggatagataggcccacaaagtttgagtaattgatgacttaaaaataaaacaagatcttaaagaaatgaatcacgttgggcaagttagaggaggaatattataagagaaaagatgagatttaaaaaaagcacacaaagcaaaaatgaaccccacatctctggaaccattaaagcccaatgaaagcataaaagaaaaagtgagttcagggggattcaaaaatgggggagagggcaagaaggtgggcaggtcagaggcaaaactctaatatggctatgtttcagatgctatttcattaacctattcagctttgttttggcttttctgttgcaaacatatgccttttcctttttttttttttaatggtatctaaatagggctaccctaaggtgggccaccaaggttgcaaataatagttttctgctgctgcctcttaagctaatcccccactagaaaattcaaaaacaatttgcctctgggatacctctgttgcagggtgtggggtagctggcagcttgagaattttcttggggagttggggtttgccaaaagcgcaaactcaattgattttccacagccagagtagaccagaaccttccccaaggagaggatatcatcacctagataagcccatctcctttcctgccccctgccaatgggaagaaggcgcttgtcttcagtaccttctcctggaaatggtatttctgctgtatccagatgcaaaatgagttctaaaggaacagcaaatgctccctccctccttccttccctttttcctttcttcctttcttctttcctttctccctccttcccttccttctttgccccttccctctcttcttccttccttcatctcttcctccctctctcctttttccttcttctctttctccctccttccttcctccctcctttctccactccgtccttcctttcccacttcttcctcactctctccttccttcctccctcccttcttcccttccttcctgccttccctctttttttcctggctttttttctgtttctttctttttcttcttcttttttccccagaatctcttcttttttcttttttgacacttctttctccatctttctaatcactacttgtgccaccatctgtaatttcccccatatccctgaaatacaggaaatggaagcagcggtgcagcgtattccatatttatgacttctcagtacattagagcatccactggcgctggagagcccccgtctgagtgcagctcggtggaaatgctctctgtgcagccaaaagaggccggctggggcaggggaagcctcggaagtatgctaatcatgcctctcaaaggcttcccatgagggctctacttggtccttgttttgaaaatgtatttttccctctgcttctctcctttacacgcatatatatttttgccctcaaagccagatatttgctgttcacactaagagagtattatgaatattctgaatgcaaagatagctctgggataggacatcaggcacggaggtcggcatgggtgtacacagcccctttatttacccagtgaggaggcaggctgcattatcacaatgctctcctccacatcataccccgatccctcacattaaactccttggcaactgattactgatgacaaaaaatatatatacagctgtacaattccactggctgctaggaatgtacaaccacagactacctttccatgctaaggaacatgcaagtgtgtgatgcatgtgtgtgcacatgtgtgcacatgaatttgtgtgagtgtgaatgtgcatgcatgtgtgtgcatatgtgtttgtgtgagtgtgagtgtgtgtgtgttggagcaaaatacttgctattgtggcagtataaaggcaaagtttaaaaagtgtctcatcacagttcactctcgtgttattaaggtgcattaatctccaaagtgagacacacacaggataaaccaaaatatgaccctaagtgctgaaggcaagccaacggacttggaaataatctgaagacagaaatatataggcagcaaacatttcaagagaaggagacttgccaggaggattgatttgaatactctgcctggagatttattttgccttattgtcacaaaaggcaatgccctgcccccagccacccgccccccgcttcaggcagtgaaggagatggcataaaaacctctttgaccgcgtggcgatggctatgtcttagtagaggctaaaaatggatgagaagtatcggagaaatgaacttctgcggttttcaaaaaacggttcagaatagatgagccaactcctttacatgttcaaaagaaagagggaacaattttgtgaaatgctaaggcagtgcaaagtgaatgttaaatagtttttatccaccaaaaaaaaaaatagacttattcaaatgcatgtcttgcttgtctttaactaaagtgaaatttcttaaatccagctgtagtcttatgggtggtgggaggtggcgggggtgggggacagcagaagcacagaacgtcttccttgaactgaacatcatgtcattttaaaagcagaggcacacacgctattgatttttttttaatacaaatttggcagatttcacatgatccattacatttctcaggacggttaagatgcagcttgcatgatttattcagaataaggtccatttttagctatatttaagtctcctatttgttatttaacatgtgtttaatgttttctgcccctgctgtgcacagctgcaagctgctattttttggcaatttttgtgactgggaagtgatttgtgtctttgcatctcacctttctattctgtgggcctgctgttttgattttttcctaaactttgaaaaataagttgctctgtgtcgcgacctctgcttcactttgctgggcaaacaggaaagcttaaagagtacaaccaaccatgacagacctcttacagagtttttagaacaacatcactgggaactgaaatttcaggaaatttatattttaaaaaatgccaagttttcccatcccagcccctcagaacggattgaagctagcaatttggaagaacgtccgtcctccagtgagaatgtctgtggtgatttaagttgatgctgacatgattctgcagggcttagccaggtaggaaccaatgtggtacctatcacctatcgaggggaaaaggcagctcccccccatcccccacaactgttttagaaaacatactccaggattctggaggcacgtgcctcagcaacatgcttactgtaactgtctctctgaatccattcttccctgaaggagggtatgccactcagggctgtctgtccagtgccaggtcaaagatgcccctgaacccttctcttcccctgcacacctgcccagaccaacacaggaagtcagcaacagacacacattgcaaagaacagagcatcaggcttggacaaagagtagtccaaccagcctagtttggacctatcatatataagtaaaaagtctgtaagtgtttacctgattccatcagacacgacgatggcactgagtggcccggtgatttatttttccaaagcccaaacgatcctgcttaatattgcttgatatgtgctaaccttccctttgcagggcctgcaattgaaagccatgcagcagtggtttaatcctggcctcttacttatctaaaacacactctctgactgtgctgtgaaaattgaatcttttccccacaatcttactgacatgaaaaatatataatacagtaaatgattaatgcagttataaactatacctgagataagatttaagtattcatatttctatcatgttaatacaacacgataaacccatgaagcaaacttgaccggggcatttgttattctgtccagtgttcaattattctttgtccaaatacaatttaggggcttgctgtaatgcagtcacttggtgaacacattatgtgcttctgggagataataagctacatcgatggtcagccgaggagatctgctccacagagacccctaccaaacaccagggaatatgaagacagatcgcatgggccctgggcccggggacaggccccctgaaaagatcatttgcaccagtatgccagcctcgtttcagccacccttcctcccttttataagagagtctcccgttaaaggcaaacttatttgccgtaatcaaaaggaagcttaacaataagtgaaactgcttaaaagctgccttcgcctaacgctgaatatggtttttttatctgtgactgtagagaagccatttctttgttggctctaaatggcccccattccttcgttgtgcaaattgctcacacgcgccaatgtgccatttaccacccacctcattatttttatacttccgatgatgtcgattttgattttcaaatgccagccatttatagctcattctaaaacacacacacaaaaattaagtgattcacaatctctgccattagctgggctttgggggcctctaagttgaggacaagcagtatagcacagtggccacacacctgcgtgtggtgtcccagatctgtccctcattagctaagagaccctgaagaagtttcttcacctctgtaagtcttagtttcctgcttaggaaggtagaatcgtgctttctacctcttaggtttgaagggcaatcactaacagtatgtggcatgtaatacatcctcaacaattgttaataatcactgtatggtcattatttcctgggtctcactgcaacaagtgagctgtccgtggacaacaggctcattctcaaagctatctgctcaaagctggacagggacccatggtgccacatcttgctccatggactctagaaattgctgctgctttgagagatgctttctgcccttggtattctgaattcagtgcctgggaggagaagcacttttaaggtccttggggacaggcaaggcagaagacattttgtaggaggctcactcagtaccctgcacaagtggatctcagtgtggatgtgaactctaagatataggggcattggaaatgcaaataggtgtgatacagtgtgtacacaatcttcctgggagtgtctgcacacaggtcctatgatcctctttaatttattttatttctttttattttttgaatttttctctttttagagacagggtcttgctctatcgcccaggttggagtgcactggtgcaatcacagatcactgcagctttgacctccagggctcaagtgatcctcccacctaagcttactgagtacctgggtctacaggtgtacaacaccacacccagctaatttttaaaatttttatagagataggctctcactatgttgcccaggttgatctcgaactcctggctcaaacgatcctccaacctctgcctcccaactttctgggattataggtgtgagccaccatgctaagcctaaatcacttttaattatgacccgtctgtaacaaagccaagtccccaagtactgacagagagctcacctgagtgggccctcaatgttcttcaaaattaataccaggagcatggaaaactcacgtttttttgaatctctctccaaagtccagccctctgtggtgggaaatggggaatccacccctcagatttgccacgcagtagacaagttgtaaggagaaagggacctctgcgtttgtttggggccaggatgagatgggccattggactggctcctggtggccagagagaaacaagaaatcagccagtctcctggtctacggacaggaagagacctcgggagagaagtcaagaaggttatttgatagattgaatgagccctctcggtgctggactgcaattaccttagggtggagattgtgaggtggaggctgtcttcatgcctactctatagaaactgacatattaatgcttcccttgtagagcttcatgaaatcaggtatttccacaactgcctttctagaacaaaacagctttacacacagagccctagatcctgatggatgctctcagtgaatactagcttttgtcagagtgaatttctttctttcaattgcaggatcagaaatatgtactttggaaatattgggaatgacatgcttggcatcacccttgaatgttcagtattaaggagggccctacagggaagggtgcattcaaggcccagagcccagccctcatccagctgctcgctcactgctccttcaggctagcaacctgcatatcgcccttcgtctgggattctcttttcttttcccagacctgggaaggaacatgcctgtgttttcgttctatgagactctgcctattcccataggagggctggccttgatgtgggctgctggcttggacaagagggtcctccatccccccaaatctcccctttctgctcttaggttttgaaacatttttaacaaggaaagatatgtcttgcttcgttggtgagatacttttaaagtgatgttagttttgaaaagggttcattcaccaaaactgaaaggagattttcttctaagactgttcttagcaggagaaagaggaaggctagaaatcccaggaagggtgccatattcccagcatcagtaaatatttgcttaataaatgaataaatgactctgggtgtctggcaaggatggataccacaggtcctgaaaaggaccttcccagaggcatttgtttcctctccagtaatggggagagtgctaggcatggaagaggaattccataaatgtttgctgaactgaactgaagaaaaggagagtctagcatggataagtccactctgctgacttcaaaaattgatgcaggtctcttgatgtcagccccccaaatactttcccatccttcgacacactggctctgccttcatgcagtggccacgatattgtccctgcccctttctggttctgactcttccgacattgtcagccttgctgtcaagatccttctcatgtccattgattcctgtgactctcattgcatcctctcctcagtccctcagttgataacttttaaacctaatatccatatttcccatggtcatcccatggacacaggctgggaccgctccccaaagccatctagaaagacccccttttctcccttctccatcttgacagcaaaccatcaacccaatgttaaggaaaggcacaaccatcagaacattttagcaaataacataggtgtaaaattgttttgtgatccaaccaccctggcttgcccatgactgtcccagtttagcactggaagtcccatgtccctggaaaaccgttggctctagacaaacctggagggttggtctgcctgcccagcaataccacagccagagtctactccaaaaaaatagacatagatgtgtatcaagacttaaccaaggcgcttttgccagagcattattttaaacatgaaaacactgcaaatgggctaaatgtccaacaacaaagcagcagctaataactattatgtctttgccatacagtaagccactctggtgccatgacaaaggacgtgctggaggaaggctgggagatgtggggaatatgaagagggatgtataatattgaagcataaatgatgcagactcaggtgaaggtgcatgtattctacatacaaagagtatacttagcactttgggccctggagccaatccagctaattaaatcatggctttgccctttactagctatgtaatagagggtaaattacttaattcttccatgccttggtttcttcatctgtgaatgtggttaacaacagcacctaccttatcaggcagtagtgaggatttcatgggttcctatacataaagcactgggaacaaagaccagctgatagagtttggatatttgttgctgcctgtattagtattctctcacgccgctctaaagaaatacctgggactgagtaatttataaggaaaaaagggttaaattggctcacggttccgcaggctcgacaggaagcatgatgctggcatctgctcagcttctggggaggtctcaggaaatttacatttatggtggaagggaagaggggagtgagcacttcacatggctggggcaggaggaagagagagaaagggaggaagccctacacacttttagacaaccagatctcacaagaactcatgggtgcaatgacaacactgagggggatggtaataaaccattcatgagaaacccccaccatgcaggtggtggatcacctgaggtcaagagttcgagaccagcctggccatcatggcgaaaccccgtctctactagaaatactaaattagctgggcatggtggcacatgcctctgatcgcagctactcgggaggctgaggcaggagaatctcttgaacctgcgaggcggaggttgcagtgagccaagatcatgccattgcactctagcctagacaaaaagagcaagactccgtctcaaaaaaaaaaaaaaaagaaacccctgccatgatccaatcacctcccactaagccccacctccagcattggggattacaactgaacatgagatttgggcagggacacagatccaaaccatatcactgtccaaatgacagtgctggagttggggcctggtgggaggtatttggattatggaggcggatctctcataaatggctttggccatcctcttgatggtgagtgagctcttactctgagttcacaggtgaacttacacctcccctacacacacactctttctctcactcctgctcttgcatatgagacacctgctcccccttcaccttccaccatgagtaagagcttcctgaggcctcaccagaaactgagcagatgctggcatcatgcttgtacaaactacagaaccatgagccaattaaacatattttctttataaattacccagactcgggtattcctttaaagcaatgcaagaacagcctatcaaactggcacagaataggcactcaacagacagttgctgctgctactggtggtggtggcagtggaggaggaaatggttattgagcctgtgccacatgtcaggctcaaagctaaacccttgttgtgactttcttcatttaatcctcatggagtccccataatccagtttaaggagttgccaaagctcccccactggtaaattgtgagccatgattcaagcacaggcccttaaagtcattactgagaacacccggcagggcactggcgagtaacgtgtgatagtgttgccatcctccatgcccaggctaacttaaccttggacaggagcataactgcttgtcagaatctcatccctgctgacagtcattaactttaaggcagcacagaagagagcatgttaagttaaactcagacctgtgcttgtcaattacaatgcctttagaaagatgctaccatgattcacgatggactcaacatgttcatgtcgacaaggaagactggatgtcacacgctggacaaaggtggtgtaaactgccagattcccagtgataggccaaggaattccaaagttaggagagctccaggtgtcaaactcatgaaggactttctctcaggtattgaacatctatctgcctaaagcctccaactgcctttcaagagaagacccttatcttcaaagaagacatgactgaattaaggggaaaaaggttactcaaaagtttaatcaaataggaaatgcagaccaatacctaatattctttgatgtgcttcaaagataggcagtcaatcatgaaagtgtttgaagaaatcgcaatcaagattaccaatgtgggatttgaagaggcagcagctcccgggaagtggggcatcactgctcatggccaagagtaattggacataaagaacgcatagattcaacttttgataacttcaattgtgatttagaagaacaaatcagaatgaaattgaatggataaatgaacatcttattgcgggctgaaacatttttctgttcaattcattagtgccaccccattcccaaataaagaagctctgatgtttcttatgactaatggtgttgtaatatttaggaaagaaggaaagaagtgatgtgtttgtgtgtgtgtgtgtgtgtgtgtgtgtgtgtgtgtatgatatatattaccatattgtgttacatatttattaattatatattattctattatatatctctcaaaagattataataatgataattatatttgggcagtgagatcatagatgtcttcaaatttttccttgtatccttcgtctgaattttctgcattatcctcactgacaatgcccaatttcagtaataagaaaactcacaccgaagaatgcaaaaatatctgaagccaaacctatgtagtccaaagctgtctgctttctagtttctatgctaagcccaacttgcacattcaaaacaccattcccgttacatgcatgcagtaatgtttcatcaaaattgcatctggagtcatgtccctggacactgggctgtcagggattaagatgggtgcctctaaattctgggggacgggctacctattgagccgtaggtagtgcctgcattttgttacccatggtgacagctgccaatgtgtgagtgaatgtgaaatgtcaagttctttggcaccattcctggaagaatctgtaatttactggcttcctcatgtcactgtctgaagtattgcctgggagacaggctatgacccaccctggatcttggcccagctttctttagggttctctgaaggccactttcccatgagggtcctttggtgggagcccttcccattcattttcctcttgcttcgaatttctcctggggaagggaatggggtctctggcaacttatttttttttcctgcttgtatttctgggtgaaatcccatggaggcacaaagtgtggagcgggggatgctgctcgccccatcttattttaaaccatgataaggtggcaggagccttcagcgatcaggaaggaagagacaaccggagagtggcaggagtgagcagaaatgactccaaaacggctttggtatttgctggaggcctcacagagaggatgcctgccagtttcgtttttattttttattttttaataccaattcagtcaacacaagctaggcagtgtgtggatcactttttttaattgctgcaaatgaaatgcataattaaatgccataaattaaaaactgacactggatgatctcactatgtctgatccaacaaaacaactcaccccaaaatgtggagaaagcagaagccttccttcactgatgtgcattctagcctctgttgaggacatgcactcctgcaaacctatagatccaggaaaggtcctcagacctaccacccctgaaaatagtgatgcactgacctcctgtgtgctctgtggccagtggtgtgcacgtaggaaaattgcatgctacagatattctcctcccaagcaaagattcaacctggtcagacaaaagtgactggtcaacttggtcaaacaacaagacaatgaaatgacagaagaatggaagatagacgtgggcatggaataagttgtgaatctaaagtctaggcaggcagacacccgagtctgaatccatgggattaataccaatttgtgcagttccattttgaataattggctaagccaaaagtgtccagactcatctcattattaaatagaacctgaagcaacatcagccctgttctctctcttaaacaccaaactcaaagttctatcagttgcatccctttctttgcatgctcaggcaacaccttagtcaacatggtcatgaccaagctcattggtttctggcttggttgatggaagaaagaaagcacggtgtctccctgagccctctggtatctacccacccctaacacaagtacactacaagtccatgccattcatggcactcaatgggcctgctgtcgtctgctcttttcaccttcctgcctctggtgtttctcctttccagtgtgccctccgccatgataccaccagaggtggctttctaaatgtgggttggcacattccaccttcttccttggaaatgcttattaactctcccctggctgtaggataaatccaaaacctgtcaatgtgcccttcgggactttcttgatccttcgacctagtaatagtcaagcctggaggctacagcaccttccagagacctgaccccagccaggagagagaatttgcctttgaacgggccatgttcctgggcctcgagtgacccccccgggcaaaggtataaatgcaggtgaagtgcccttccctggcactcttcacccatcacaatcttgttctttgaaggctcagctcccgttaacagaccttcagttgggccaagtcctggaactactacaccatgggagaatcaccctctgcagctggcttattacctggtgggactgaactccctgaggacagggatcatttttaactcattttttttcatcttgtcatcatccagcatacaaatccgggagactcaagaaatgtttgttgaatacacaaaactctgaaataatcatagtcgtacattgcttaatgacaaggatatatactttctgaagaatgtgttgttaggcaatttcatcattatgcaagcatcataaagtggacttacgcaaaccaagatggcaaagcctactccacacctaggctgtgcggtatagtctattgctcctaggctacaaatctgtacagcatgttactgtaccaagtactgcaggcaattgtaacacaatgggaagcatttgtgtacctaaacatatctaaacatagaaaacatacattaaaaatatggtatacaagataaaaaatggtacacttatatagggcacttcccactaatggagcttgcaggactggaagttgctctgggtgagtgagtgagtgagtggtgagtgaatgtgaaggcctaggacattactgtactgtactgtagactttataaacctgtacactcaggctacactaaatttatattttaaaatgtccttcaataataaatgaactttagcttactacaacttctttactttataaactttaaaatttttttaaccatctttttttctttctttcttctttctttctttctttctttctttctttctttctttctttctttctttctttctttctttctttctttccctactttcctttctttcctttcctttcctctttctttcttcctttctttctttctttctttctttctttctttctttctttctttctttccttctttccttccttccttccttccttccttcttttttttttgatagagtcttgctctgtcgcccaggctggagtgcagtggcacaatcttgactcaatgcaacatctgccttctaggttcaagcgattctcatgcctcagcctcctgagtagctgggattacaggcagacaccaccatgcccagctaatttttgtatttttagtagagatggggtttcacaatgttggccaggctggtctccaactcctgacctcaggtgatctgcccacctcaacctcctaaagtgctgggattacaggtaagagccattgtgcctggcctaactttctgactcttgtaataacacttagcttaagacacaaacacattgtacagctatacaaaaatattttctttctttatatccttaccctgtaagcttttttctatttttaactttttttaattttttattctttactttttaaacttttttgttaaaaacaaagatacaaacacacacattagcctaggcctacacagggtcaggatcatcagtatcactctcttccacctccgcatcctaccccactggaagatcttcaggggcaataacatgcatagagctgtcacctcttgcaatacctgtggtagcaatgtcttcttctggaatccttccggaaggacctgcctgaggttgttttacagttaacttttttttataagtagaaggagtacatcctaaaataacgatgacaattattgtatggtaaatctgaaaaccagtaacacagtcattcattatcattgtattatgtcctgcatataattatatgtgctacactttaacacgactggcagtgcagtaggtatattcacaccagcatggccacaaacacaagtgatgctttgctacgacttaaggatggctacgatgtcaccaggagacaggaatttttcagccccactatgatcttttgagaacactgtggtacatgctgtctatctttgaccgaaacattgctatgctatgcaaaacattgctaaagtatagaacataattatatgtgctagactttcatacaactggcagtgaagtaagcttgttcacaccagcatggccacaaatgcgagtgatgccttgtgctatgaccttaggatggctcctgttaccaggagataggaatttttcagccctattgtgatcttatgagaccatcgtagtacatgctttcagcactgaccaaaacattgctatgtggggcatcagcaactcagacaggaaaaagttataattcctgagagcagtaccaggtaactgaggccatattctgaaatcaaaaataccaggaggcctgggtatttgcctcccctctcttccctgctcacctggaccagacaggctgctgcaaaccctcagtcttcggatggacttgaagctgtcagtctgtggctctgtcaatcacgggcctttcgaaaagactcaaattcattaggaggggaaaaaagcctttaagaaaatgttgtcagaaagaatcaatcagtttaaacatttaaaagtaaaatgtgcgtcagttagtctccatgggaaggttttcatattgcagggcattccctcctggagccccgcattctgaagtttccttctgaggctcggctgctcttgaggtgagggcaggggaggaggcagcagcagcctgtgagctgggggtgctgaggctgagtgagaagtggccatgtcattctctagcactgcacatctcacatggatataaagagatgacatggtttcaggttctttatcagtcagggtagagcataattatttgatcttgttttctggctggcattggagtatcctattcattcctctttttatttatttattagagacaggatttccctctgttgcccaggctggagtgcagtggtgtgatcagatcacagctcactgcagccttgaactccctgaatcaagggatccttccacctcagcctcctgattagctgagactacaggtgtgtgccaccacacccatctaacattttttatgttctatagagaagagggtcttactaagttgcccaggctggtgtcaaacttctggcctcacgtgatactcctgcctcagcctcctactgttctgggattaaaggtgccactcactgtgtccagtctctattaattcttcttgaaaagagagaagaaaaagagaaagaaggaagggaagaagaaaggaagggagggagggaaggaagaaggaggggaacaaggcaaataaagcaggatgaaagagagggagggagggagggaggaagaaaagagggaggaagagaggggagaggggagcaaccttcatccatttgcacttgatgacgatataggctccccactttgtgctctctgagtggctctcccagctagttaccactggcttcatttttgtggtgcagaggtgttaaataacttgcttgagcacatgcggctagatggaaagcatactcagaatccactcttttaacacattttgttttgaaaatgcaaaaaggtagaaataaagacaagtaaaagtggaaatactctcttcagccatgaggtatctttccagatataatggggcacaacagaccacctttggaatagagtttggaggtggggctggggatgaagtggtgggagaaggattttttggagcgaagaagggggctgaggattccacctgacacccttctcactgggtcagcatccaaacagtccctgggatggctttcttgggtgaaaattagtttaaaaatccaattgcatacaattttaagtaaagggacaatttctcgaaacatcagagtaaaacccaaccaatagagtaaaaaaccaaaccaaaccaaaccaaaccaaaacaaaacaaaaacaaatcttcaagtagtttcttctattggtctcttggaaactcaaatcttcacttgtcagcaaaccaaacagctgcctacatggggagctttcaaaagctttagcaagtaccatgttctggtttccctctcccagtgaatttccttaaacacctccccagccaaccagaaattccaccactggatatgacggtggcctcgacttttacttttgttcacatgcaaacatcttagcaacaaacaacttacatgttttcggtcccgacgtgcttgtcaatgcaggaaagtagcctagaaaggagagtataaaacatgaaaaggaaagggaagcataagccaatgacatccaaggctgaaagagagtggaaagaaccaaaaactgatctgacatccctccatctctctttcttatataataaagtactttcttcatggctcaccacagagcaatccaacatggcacccaggtaagtcatcatcagggacagatacaaaggaaaataaaattgtccacagagaaatagaaaaggcctggacatgccctcctctccagcaggctgccaccattaagaactgcacccttcccttggcacagctggtgagtccaggggactccaggcctccgtggttactgtagcccctcttaatctcatgaggatgtgacacagggtcggcttgctttggaagtgaacgggggagaaaagggacagtcaaatatctgtgactgatatttaaatttaaaaccaatgctattttatttattcattcatttgatttctttaaaaaattaccataatagctagaaatcccattggctgtcttgtgtgtgcatgcacacgtgttctggcacacgcacacacacaggttacatttttagggtacccagttcttttctaagcatcccggaggctctgaattgaaaaggaacttaaagctatataaatattcttcaaggcctatataaagaatagggtccccgccaactagtcacttactcttcgcttgatcacttctaataatagggaactcactacttccgcatgcagccatgcttcctgtttagacagctgactgttagattttgacttaatataaagatgaactttctgtttctccacttactgaatgcttttggcattccaggcactgagctaagccttccacacatatcatctttgtcaattatatcaacagccctgtgagacagggatggttttacagagaaggaaactgaggctcagagagacaatttgctgaagatctcattgttagttagtggtcaggttggggtttggtcctaggtctcctggcttccaaattctcaggattgaatagtgggcttaagcttccatcctatcaatggtccggcatcatagagccaggctagttccccttcccatggaaagcccggtaggaggataagaaaaactctcccatcttctctttctgttcacctccacccctacccttccctggaacctcatctttcacagggtaaatagcccattccccaaaccagcaaccttttcctaagcatgttgtaagtgacctttgtgaatgtcactgtggagtaaacaaataacatttgtatattttccatggtggtcacttcctgcctatgctgtcctcaggagcaaatgacagaggtgcagtcctcaaacaatcaccacctccttagtgtctcgcagcctcttctcgttgggccgggagcagggcctgcagcatatacatttcatctagctgatacctcctctgtgatctctcctgccaactggactctgaggtccttaaggaaggctttattcatctttgttctggcaacacctggcagggctcaggtacacaactgaagctcaacacctctctgcaggaggaaggtatgaaaggagaaaggaagaaagggagggagaaaggggagacagagagaaggaggaaaggaagaggtaggaagaaagaaatggcggaagaaagagaggaaggaagaaaggaaataaagaaggactcaattaggggtaaaattacttaacttttatgaaaggaaagccattcatataaataaagtcacttcctcttataggaaaatacaaaaagatttgggatataatcattggctgattatagagataacctagtgatattctaccatttggaaaactactttttagttcttactggtcaagtagtaaatcggaagtatccaaatcacaatcatttgtttgttcttaaaaatctaaattaaggccgggcgcggtggctcatgcctgtaatcccagcactttgggaaactgaggcaggtgtatcacctgaggttaagggttcgagactagtctggccaacatggtgaaaccctgtctctacaaaaaatacaaaaaattagccgggcgttgtggcgggcacctgtaatcccagctactcgggaggctgaggcaggagaattgcttgaacctgggaggtggaggtttcagtgagccactgaagagatcatgccgctgcacaccagcctgggcaacaagagccaaactccatctcaaaaaaaaaaaaaaatctaaattaggtaaattagaaatttttcaaaaaatgaaaataagtgtttgaatctccaactgcttttgagaggttggcagttgtggccagtcatttcttcctggcaaaagctggctgaagttgagcggcacatgctggtatagaaggagctcctgaccctgggttcatgatggaccctgcccagacccccacactttgtgtaattcctgtctgtccagggagctgtctgcaatggtggcctctgtctttcatctgtgtgtgttattttcacactgagtgaaagtgaaacaagttcattcattcttgtccatggatccttgcaaatctccagctctgaaatcctttaattctaagtcttgttcttaaggtgcccaggaaccaccagcactggccagccacacagaaggcagtccctgcaaccttgcttagtgacggtgctgagccctccacttaccagctccatttatgaatgctagtatttaaggcctgagatcttattttcaaataaattgcagcacaccaaactgagttttgttttgggaatttgtgagattgtctcaagactagccccctaatgtggggccaaacagcaaggacagaaaaaacatcagggttccaccgtctcccagtccccccaaagccctggactatctgaatgtgacaaaactaacttgtattctcaaatgtccatcctacacatccccagcccctgtctcacctgtcagtctctctcagttagtttgcaaggaacacaaaattgtatatagagtctgaaagtgaatagactatgccttcatggcatggccttattggtgaaaccccaaggtcaagaggcaggagaacccacagcacctctgcaggcagggatgccttcctgaggctcagttttggagacaggcaggcgctttatggggcctgttagtgggcaccatatacatcagatgactcagtccgctgtgttcctcttgatgccgctgaactgcttgcaagacgatttctttgagcttccttcctcccttcgtcgagcagagggggtaagtcagggaacgcttttatgtggctgctgcgtttccaaatgttcctctatgattgacagctctgcattcagcttcccattatggcacctgcagataatgagatatcttgaaaccggaatttccagcgcctgagcctgccaggaatattatcatcagtgttctagaaagccattcccgctgcacacatgacctctacaaatttgaaatgtcaaaacacagccaggagctgaaaccaaggccactccagtccaagtggctattggctcttgaatatacaggaaggagtcctctatcttgggagaattatggattaccagaaaatagtgatcttttcattaacctatatgtatttagaatgtagataatgtctgtcttttatcattcgcatagcctgtgtgtggggggacctgagaaatgaaggcctgggcattccccagagaatccaggactctttgggggctaactcaggccatcaaatctcctcatcctcagtggcaatctggggcttaattttgtagacgttatagccacctagaccttgttgtgttatcaaagaggataaaggtagaggaaactcagtcctacctttggaattggaagtttaatcttctacttgttcattttcttctgtctctttcacttgggctacaagcttagagtcctcagcacaagggggttatgggctcacctgtctactcaactgagcttctggtctgtgccattcactatgttgtgtgcttaatatgaattagatattttaggagcttgctatatacagacggtggcacttggtgaaggattttgttatcaccctcaacagggagaagcagagggtcaggtgactgatggggggtagaaggaggaaaagggtatttggagagcctgctcttggagctgggctacaaggttgggtgggattttcttacaggcataaactgatgagagtgagggtcatggattgacaggttttacatgcagatggttgctcatgaacaaagtcctgtaggtctagaagtacatggcacatcttgggggcagcaagaggttgggagggcctggatcacagaggggctgcacacaatgggagacctggctaaagagggcaaacaggccctcccaacaaaggcccgagagccagcagggctgggccatttccccaaagtctgaagactcggagtctgtagaaatggctcttacaacctttatctctttcttcctttccatgttgttgataggccagtcttccctccctctccccagttctccatccacggcagagttgaccctatagctaggttctaagggcagacacagaagccacatgcggccaccttcaagagctcttcatcgttccatcagagcgactggttcaggatgaactatgacccaaattgggccactgagaatcagccttgagattttagctggtgtcttcatgagccaggtctgctatttccacagagatttctaggcaggcaaaatagaagcttggcactgctggtggtcatcttgcactgcctggagaaagatgagctatggatgtgccagtgtggaggaacgcagagcagagatgggaaaggtggagttctcctggtgtcattcagcacctgacttcagccatttctgaagccagcttccatccctggattgtaccctgggagatgatacatttttatttatgtattacttgaaacaagttttagttgaacttctgtctcttgaaaccacaaataatcatagtatgtgtaacagcacgcattggcatagcaagtagtcctgttctcaccacaatggctttggggataacgcattggtacctgattggatattgagatgaggtattgcacaaacagttgaaggctatgcatgcacatttttctagacacttcactacttttctactcacttggtctctctctaagacctcagaccctgctgacaggtgcaaagacatccactccattccctcagtgcagatcttctaggtgtccacaagagaagcccattaggaccccaaaactcagagctagcaaagcagaaaactcagaccagttactccaagtggagctacacactcaggagatctccgtggacaggttcagaatcccactgaagacccggtctagcccaggtcagcatgggcagactcaggagtgggagcctgctctgggtggaagcccaagtggtccagaggtgtcccctgcaggggggcctctagctaaactgggtgggacctcttcctccttcctcttggaggctttggctacatgggggagtgagcaatgggcctcctgctcctccgggaagcagatatggctgaggcctgccctcctccaatggggcctggacagcaggcttttctcagcacatgaagacaaattcagcccagagggtttctctcctggttaagctaaggatatgaagttggtcagggaggacgaaccacattcttaaaaggcatcctgaataaaatggctcaataaccacagaagattggaaaatcatattccagtgcctcagaacccccaccacacatgcacacatatatacacaggcacacatacatatatgcacacacatgcacacatacatacacacataggcgcaaacatagacatatatacacctatagacacatgttcacacatacacacatgcacacacatatatgcatgcatacacatgaacatatagacacacacatacacatgtagacataaacatagacatacagacacatatagacacatatgcatgtacacgtatacaaacacacatgcatacgtgcacaaagacacagtgcacacacagacacatacatagacacatctacacatatagacacacacaaatatacacatagacacatatacacatagacaaacacacatatagacacatatacacacatagaaacagacatacacactgagacacacatatacacacatacacacatagacacacatacattcatagacacacacttacacatatagacacatctatacacatacagacaccacaaatatacacatagacgctatccacacatagacatgtaaacatacacacatagacacacacaatacaaagatacacacatacacatactcacataaaaacacacatgcatacacaaaggcacagagacacacagacacacacatagacacacatacggacacatacacacagatacacaaacacacatatacacatgcacacaaacatacacagagacacgcacacacacacagccacacacagaaacacatatagacacaggcacataaaacacaagtacacacagatacacactaacaccaatatcacacacacacatacacacacactactttctaaagactcgaaggagtcctatcagggaaaatgcacacgacttgtctgtcaggccagctggccctaacaatggaggcgtgtgtccccactgaataattgaccttaccccaggatccccagaaagcttttttttttttttttttttttgtttttcttttcctcccaatagcatctgaggacaaagagacacttgcagtagcggaacaggcctctccgggtaaaattagaactgtctctagaaaggtgcacgcatgtgctccaacatacagcaaataatttattgtcaggtgcaattcccctgcttgaagatcgggtggctctctggccatccacgccagactggaaagcagtgtccctagtccccggatcctgtccagctgagcgtagacggcagtagccagggactggcagcacaggctgtgtgaccggggcagggctgggagagaaaatggccgccctgtcgccaggtccttctgtgtgtggccctgtcaggaaggagccggagctccggccggggctggctggctcccgctaagtactaacgccacggtggcggtgggggacaggagatgagagacagaacagggcagctgcaaatggaaatcaccctagggaaggttacaactagataaagttttcgacaataagattccagagactgctgacgggagcaaagctccgtattttagtctcagtacaaatttgcttcaatcttatacaactcccatgcagcattgcccacagctgcatgctgtaaacaacaaacaaatctatttccatcagccctgctgatgccaggagaaaagtgcctgagcagaagacatgcacagatgcaaaccctcacctgagcctggcgctgccctccatttggcctctctaacttaatatcgttgttacaaagctattggtctcctggtagctagctggctcaacgcagtgcctcttcttccagctaatctgacaactccgatccaagaagcatcaagggcccaattaagaagacacatcttatcaaggagcttattttgcataacagaatacaaatgacgaataaaaatttaatgtttaataacttagtacaaagagggctgttgatatagaatgcctggaatttttatggaggctgtcagacttgtgataaaactgttatataggaacacttggcaaaaaacagcgtagaatttttcagtaatggtgtgtgcatgatattgcattaattcttgatagggaactaactgtaagccagtttgagtttcagtgtaagatggtgtgtgtgtgtgcgtgcgtgtgtgtgtgtgcatgcgcgtgtgtgtgtcgtgctctatccagaatgctctgagggtgtggctggacatgcacccatgcctttatggaggagaatcaaagtgcattttattgaggactttgcagagaagttgctcagtcctgcataagacatctgggtgtgtcttatctagaacagaaatggcaggaaatgagtggggtcactttctgtagtaactatcctgacaccaagagttgggcaggattcttaagggttgcttgggagcattggaaattctccatgacctctgtatgagggtgagtgtgtgacacggaggaacagtgtgtgggagggtgcctcgctagtctctggtctccgaaatttgatccctggaagcagctaatagagatatgcacaaaaattcatgcctgagctggatacttatcgactccgcagagctttcctattgctttagccatgaggacatctttcaatgatgctttcattcaaatatttactgacaccctaaacttggctcagctctggaaggaaagccacagttcttccaggcccctctagaaagcgggtctgtggccacaggattgactcttgtctctgccacgcactacctgcaagatacttgaacaagttacccgacttctccaaacttccatttcttcaatgtaaatcgaattatgaatggtacctacctctctgacttaaagtgatcacccagccttggcatttagcacggagtcgggagcacaggaaactctggatgtatatcagccttctatcacgttatcgatgcatttcagagcaattgcatctcccaagctttggcccagaggagcattggtgtccacactctgaatggctttaggctgattggaaaaattcttgacattatggctgtgtctccacaaaattccaaatgtctgtcgagagaaattgagccttcatctctagtaatgctttatttttaaagtggccattaactagggctaaactcctgctgaattagagaggaaccctttcagatagatgtacatatcacatctatatgaatgcaagatgaatttcatactcatcctgtcctattgcattagtgttattacattgaatactaaatgaatttctaatgattggacactcagaggaaaatgtgacccttcacagtagtcgtcaaactctataggtggattggaaattgtccggtgggggcttatcctactggcaaaaagaacacacgacccaaaacacaaccttaaacattattgtgtgggctactggaaagcataatttacttgatgaggctaatattcaaatgcaaacttatattagaattaacactacaggaggggcttttacatggaggatttgttacagaaataaaatctatcggtaacactttcattgttccatcattatgatctcatttggtattcactgtaatggcaccgatcataatgaatttgtttgatattcatgtggttctcccacacattaacagagtttctgttataattcaccatccaataagcattagttaatgcagactttagaccaataaagatggtctatcccacccctagagttgcctggagctgtctaagagttcagggacattttgatattgaatgatcctcctgcttcctcctggttcccatgccatccctcaagctggagagggctttctgaatcccaaactggacataaacaagaatggtctccatttagtttttggagcccagaggagcagttggagctgcaccctttgatgccaccagttcaaccctcacagatgtggactgtagaattaccctcctttctccctgtctcactgggactccatgggggcccagctaaacaatgctcccagcaaaatgctactcatgccagagtatataagccagtccactctccaaaataacttcctacaaaaaatttcagggctgtgctttggcgtttggacaaatgtttactctgccttggatccctcagccagggagtgaagccagtttctcagcagctctgactcgttggcaatcaagtaccccaaccccagagaaaataaaatctgactgatactggcccagttacttcatcacttgtcagggcactgggtgagagctctctattaaactctctggtaattaaacttgtgaaatgtccctatgatgcttcttagtaatgggtttacctgagtgcactgtccaggagggacttgccttgccatgccactgggagggatggttccatccctaaccaccactctttctgtttcaattgcccaaatatttattacaaggaatggcaaaaccgcaattgcttttgcaccaaactaataatactcatccagtacttctagaaaacttgtgagccagcatcaattttcaagagcaaggtgctgcccacgattatcttgaaaataatgtctgatcagtttcttagtacttggagaactctgacctccaggctaagggcatgatgtgcaaatccacactccttaaatcttcagtgccttttgcaaagacacactctaaccccaggcctgaggtaagaggacagggaagcaggtcttctagtgcctttgtaagggatgccggtatggtgagcaagcatgtacacaatccaaagaggtggggcttcctgtcctcccagaaagaagtgaatcctcaggaggatttctcccctggctatctgagcgtctttggacaagttgcttgcccactggcaatcaaatgaattaaatggcccagtgatcctcaaaataaacttttccatctgtaaaatgaagataatataatagttgcaaagattaaggaacctaaggtatgtagaaatagcactcatccaagctctaacataaagtctggactcaaactgcactagaattcaagattattgcatcaaacagcacgttagcatcttagctggaaacagatgttcctgctccaggctgcccccacaagtcaggtttgctgggcctctttcattgtctctgcaatgtggagtttcttttgcttcagagttatcctcacggctgtgattctccagcatctgtagctagaaaggagcaatgcagaatcctgggaggtggatggaagctgcctccctctgcagtgttaggtagaagttccttggattgcttgggtaaatgcaatgatttccttctgccttagtcttttgttgttgctgttgtttttctctccaatgtagcaatgatttcccattttaaaatattaagccactaagctgtaagagaaacaaactcctttgggcatttttaacattacctcagcagaggaagaaatgtcacatggtcctataccgcactgtcctcaaagggaatgtatgcctggccccaaacatagcttcctccttagcaggacacaaacaaagcagctaaagatggaggttaaggccagtcgactgcttccaggtaagccgcccttgtagtccctgggatgaaatagggcaggcaccagaggccctgggctggtctgccctagttttgtgggttcctgtcaggtcctcagagttatttagcatagttttgggtgagatcagttcacatagagtgcagtataaataccatccccaatgtgccaagaagcagttcacgaggtgtgccctcaccaccagcccacaagtcacgctgatgagctccgcgtaacctcaccttgaattagtgaactgcgacttgaaaaccatccttcaagtgtgtacaatttttttcatttttttattttgaagagacacctacttgagagaattcctctctggaatttaagaaataatgaatgtggacctcaccagcccctggccttttcgtagttcataatgaaaacaaatgttcatttttcctttaaaactgtcttgagctaaatgatactgacgctttcaatttttaacatcataatcaataaaggctgcttatgcacactttgcaaaaccatcagtttagaagtttgaaaaaaaaatctgcatatggctgcagcttgctggctggaacgctctcgcactaaatcttctgagttaaagttttactggtgtgttatgagtaaaaatgccttgtcagccatctgccagtttttctcctaacatccatatttccaacccttgctaaacattgggagcatgcggccacaagaggccacctctacaattaaacagccaagcgcagcagcagaagcaagggcatgtcatgagagaactgtctagtattaattttaaaagtccataaagactagctccgacccgtccaggatgatagacgggctgtgaaatgtattagaaactgttaaccccaggagagtaagaagagggcagaaaagcaaaaagggagagaggaaaaaaaggaaagaaagaaggaacagaaacaatcacaaacaatgcgccagtgtcaaaagcttcaataagtgctaatcatggctgattaatcagtctctaattccactgatccaaaaaggttacagagtcaattgtgtaaaattagctccttctcatgtgtccctctgcatttcgagcctctgtctgttcatttgcatcttttgccaatgtttactaagaattcagttcattagctcttgagcataaagtcagaaattggaggggactctgcattttcttgctgagagtagtgcttaaaacaaatagcatcacttcctcaaacatttatagattaaactaaatggcattaattaccgtaaatctcctatttgtgaggagaaagaggggggaaagaaaaaaaatcctctttctccatacccacagtttcatggcaggattgttccattctcatctaatgtctcatacagttgggggcaaaatgtttaatcacagaattaacaggaagcgaatggcaagggaagctaacaaggcgtgctgcaaggaggctagctaactttttatagagccgtgttttgcaaagctcagaagcagaaggttgcttttgaaagcccttattaaaaagagatccctgccacatatgtagaagctatcttgggaaatacctgttttacccgtgtttgaaaatcttgaaacctgccaaagggaggtggaggagccagcatggggcctggctcaggaagtctgcccagggcctcacagaggaagctggggattgacatgggagagggggagctcctgcgtgttttccaaaagtgcatcttgtgtgtttcagaggagagaatgtgcaagtcaaacaagcggaatggtttgtagagcaagggggtaatcttgcaagaagccacacacctttctgggaaatgtgcagaattcttggtccttggaaaggacaagacgccacctgttcagacttcatttacaccaagggtgtcgcacctgctcctctttaggagacgtgggaatggagcaggagtaacaccccagagagtcgtgttggcctgggagggactagagccttccggagctccctgctgtgtgcacagccaagtatattttaaacaatgtgctggtgctgatcaaacccaggggggctgcttgcagaaggctggccacaggcattcactctggatctctgggtgctctcccctcctctagcttaagtatattcacatagtctggtccctatgcctctgcttctattttcctacatattttctgcctgaaatgcctctcatcctaccccctgccgacctcttctttccccaaatcttagcaaagcatcaacgatggaggaataggtattccaagtggaaacccttagacattggccccaccctcccagagctcacatggagcaagggaattctagatacataaggaagtaataacaatcagattacatgatgacagcatcacctcctccagggagcctcctctgatttcctcaggctgcattcctgtttctctatcctgtgtgtctcttagcaagggacttcctgttttccaattatggtttctgtttctatcttaccttctgagtgtgagcctctttaaaattttttttgttttgttttgttttgttttgtttttgagacaggatctctctgtcactcaggctggagtgccatggcaaaatcatggctaactgcaacttcaacttcctgggctcaaatgatcctcccaatgcagcctcctgggtagctggaactacaggcatgagccaccatgcctggataattgcttaaattttttgtagagacaggatgtcactatgttcgccaggctggtcttgaacacctgggctcaagtgatcctcccttctcagcctcccaaagtgctgagattacaggtgtgagccattatacccagtgatgagcctcttagggataggacaatatcccaagaccaagttcatccccagaccaagttcagcgctaggacaaaataggtgttcaatacacacttgttgaatgaatgtacctcagcaaccagaccctcattttgcaatgtgctgtacagacactggtcctttccttctagctgtaaaatgtcatgactcaggactgggcctctgacccctctggtcccaggaattaacaggtttgcagaaggtgtggggtatgtattaataagatgtgtagctattaatccagcgcaagatgagatgattaaagtgaaacccacagcaaggtccagatttggggaataatgtgatggaaagttatttattacctctatcttcctttatgtctgtgtatctgcccattgctaaatacaagcatcttgagggcaggactatcttgttttcttcctgaccctaaaatccaggacaagcctgacttgcagtagatacctacaaagtatttgcaacggaatcagtgggtaggcttggggcctaaagcacaaagcccctttcttatattacagcaaatcaaggatcagagtgtctaagcctcctggtgcttctgtgcccatgtaaacatacctgtatatccgaaggtgaaagtcatttatgtcaaagttatgcgtggaaatcccttaggatggtattttgttcgagacccacagtggcctcccagttgggtgagcaagccatttttccctcccgtgtagggtacaccgttgaatctcgggaggaatattagaagtactagcttgcctttatgatcctcgttgtatttttaaaaatatgtcttttattttgtaaaatgtaatgcaatgtagtgagacattcccatcatgggactgagaacaactgagggtgtaactccaaggtcacatcacccatcatcctcaccctgggtgaggtgaatgtcagcatccaaagtccctgcactgctaaagcagggtctcctatagtgtcagtaaatctcctctgactgcccagcactcacttactcagagaaaccacagaggctcaggtcagcattaaggactcaagtgggtggcttctgagcccagcctgctgtttctagaccctccttaggctcacaccaggtgggtgcccgggcagagctagggtgggctggcacccgagaaggaagggcgggaggctccttagagtgagctcctcggctcgcctctgcttcctgattcatcatgtttttttattagctctcttttctctgataaacctttgcagaagaggcgctcttggaaacagctggagcaagtcccttcagcaggtggagtttggcagacaggttcccagatccagccaccaaatcgctcaagctcccacttcaatgaggggaaaagagagctgcaacataaagcaggctctgctttcccacctccttgtttaactcacccaagaataaacgcaacaagctgagcgtggagaggcttctgctcttcaacaatgcagtgggtcccagacaccccgtttctaccaaggagattattgtatttattttattttattttattatttatttatttacttttggcaaaaattcttcttgagctatctcttactttctttttttcttttcttttctttcttttttttttttttttttttttgagacggagtcttgctccatcgcccaggctggtggagtgcaatggcgcaatctcagctcactgcagcctccacttcatgggttcgagtgattctcccgcctcagcctccctagtagctggaattacaggcacttgccaccttgtccagctaattttttattattagtagagacgggggtctcaccatgttggtcaggctggtctcgaactcctgatctcaggtgatctgcccacctcggcctcccaaagtgctgggattacaaccatgagccacagcgcccagccctctgtctttctttctttgctgtcttttttatgttttgtctattcaatgagggagtgcagagaaggctttgcttggagcagacacctctatgcattctcctttcttgcctgaactttctcccgctttctgcactcactctgtcctccttctcattggcttcaacctgcaatccaatgcaaaagaaaatgggaaaatcaagggctttcttttccattatttaatgtcttgtttttagatttttaaaattctgacctgaaatttgaaaagacattgatacagcaccagtcatattctgttttaaattctcatcagaatttgtactcatgtcggggcaaagctatgaggagatggccaaggagaagtgctcaatgcccccaaccccagcttttcttccccaagacaaagtttgggctccatttccttatttctttccatttgtgtttttgcttttacatgatgattgtgggaagtggctacaatcagtgacaaccagcaaggtaggatgctgctgcccaaagccacagctgacccagaaagacactcccagattattggcagcagcggtattttaagaatttatagagtggaggtaaaaagggctttctacactatgaagtgggcgagttggtctcactctgggcgggaaaatttatttcaatttgcatgccaattgtgatggattggtagtaatggcctggaatgctgaattcaggagggttcactggctatgcctgtgctgagcagaacagtggcctcccagggccagtgactttggccactgagctaatgggaaggaaggtccctacctattttccttctggggctagaatctccgagctcattttcaaatctaggcaaggcattccaaaatcaagaaacactccataagtccataccagatacagtaatcaacttatttagctttctctgagccatcgttttggcaaattgaatactctatggaaattggtttttttcatgggacttcactgcctccctccctcacccccttgcactattgctgtaaaggatgctgagatatcagagtcaagcattcagttgtttcagtttctttgatggtgattagcaaaatagaatatgtgtatccttcaaggggagatacaattccatgaatgacgatagttgcattttctttgacatctttgtagctgccatatccatttgcaccacaacctgtatacacatttaaaaaaagacaaaaggaaaaaggtaaacgatcatgagatgtatttcctgtaatatttaataatcacattgaaacactgacatgcattgcgctgcatttacaaacctctgtttcctttgaaaattacaccctagcatttaattcaccaaaataactcattttatacagcacaacaatgtagtaaaataactcatctcgaatatgtggatatgaatagatttaacacatctgcattgaacaaaatgaattaatctaaaagccgagaaactgctgttctctttcgagagttaccgattattttaccattcccttcagtttacttgtttgtttttgttaaattacttttggaattaggaaatgaggaaagcagaaacactagttaggtttttctctacttggaatggagaaacgggacataaataatcatttgcattataccttatttctttaaaaattatatttacaattgtgcagagaccaaggagaggcctctgttcactgtgggcttctgtttaatctttggaaaatactgtatttccattacaaccctctcccaaaagaagtctagatattaaaattattttttgaagctgactgtaaagtgctaaaaacaaatcagagttcaagtgcatttcagggctcccccctgggaggatattcacttgtagacgtggagcccgtctcccgaaagaggagatgcatatgtgttcactgcatctgaattctcgcacacggggctgtgggctccacagtgcagcattcccaaggctcagtggttatttctggccctggccgtctgggcaggcacaggcatcacgaggagaagagcccatctgtgctgatggtttgggatggagtgtggtgacccaaacccacagctggaaagataaacccaagcacactcttcatgtggggcacaggtgccacaatctgggtggctctgacagttcctgggtcctggagggcctctctgatgcaattaactttgagggcaaccggcaggatctactgggccccattcctactaactctacagcaaatgcagccagaaggtctcccttccatgagctgggacagaaatggagaccacctttgtgcggagggatataaaaaggcagagtccccaaatcttcagatgcagagccttcaggtcagagtttgcaaatggatcctatgtcccctttcttgcagaaaccacattgggatgtagcacccaccacttccagtttcaggctctgcaaaatggagacagtttgtgcagtcacttaagtgcagaatctttatcttcacgatttcttgcctcagacatatactctactatactactatagcttcccttgtaggaacttttatcagtactccggtctctctggagtctttccaaagccttcaacttagttttcatagggaaaaaaaaatctaatttttcacctcttatttgatcaatgtgcacaatttattaaattgcataatgacaattacaactaaagcaggtttgggaataaactcatctgattcctgggaaatattcagctcacccagtgcaccccccctcctaccccaaccttgagcactcaggacactatgggcctcatcatccagggcatcttctagaaggaatggtggctctggctacctctgagttggtcaagagagggctggttaggggagtttctaagatcgaccagatatgatctaggagatattcaggctatgggtaggcaaggtggggaccatgtgacgggctttcctactaaggagtttagagattctcctggcagtaataaggaactgcttatcgtttctgggagagaaggaagcaatttcatccaatttgccgtctggaaagctcactgggttgcagtagggaatggactggattattgtttcttagcctttctcccgcccttgtaatgggattttacacccatagctttcgtgaggtgtgtgcctttgccatctctcccagtagagtaggtggctctttgtctttggacttaggcatgtggctgctttggtcaatggatgttggggggacatgagggaaccacaggctttgcctgtgtctgggggacttggctgtcactctatcactcctgcagtctgccaggaaaggaacatgcccaaggtggtcacgttcccttcagcctgagccttggaatgagaggtaaaggagcagacctgaatctgacttgcagcctggagcaaagttgccgtatccgacccacaggcccagtgagaaatgcccgtttgctgtgagctttgtaacaaacaaccctcagccctcaatgaggatgtgggttgcaattgagccatattgcagatggctgattaatacagaactggacaagactgagtgggatgggaagcaggaaacccatcactctctctcacccagttgggtgacttcaggatagtccgcgtccctctccaggacccattttcttgttggcaaagtaaggaagtcatagtaggtgatctctacgggccttgccacctctcaggggccataacggagcagaagaggagatagagcatcaccttgccctggctggggtacagtttctacaggagggatgatttccgtcactttcaccaggaaagggtcttggtcttcacgtcgtttgcagtccacaggatgccaagacccatttggcagtacaaaaggacatcctgaaacagcacatcccaatgtccccaaagtcactgcaagtcattcccatcaccccgtcccgtcccccgggctccactcacacaaggtgaaatcttgcatgcatgtatcctaaattccttgccctagctcccttctctggtgctgggggcagagcattcctagagaaggtcttagggtctgtggggggctccttaccaggcaggagactttctgccaggagccaggcctgcagggagcagctttggggtgggattttcgaggaagagtgattatcagggcatcggtaataaggggggtgggaagagcatgagaagaacaatggagaggcctccccggtgcagtcactctaaggtatgtcaccttctccgatgccagggccactgtcagaaaggcaacttcatctaactaattagcagggtttgccactttacaaatctgccgcggctttcttggcacgaaacagccgcggaggcaaagagctgtaggaacccattaaaaatcacagggctgaaagaaaaggagggcaagggggaaatttgagataagaggtgggggaaggaaggaaatttccctgtaccaggccagctgccggctcccctctctctgtccacatgcaagcaggaagtggttaaagtgatgggaaggggaacccaccctcctcttgagctgggcctctgatctctgcatctggtttttcctcttgaagcactctctggttttaaagtggctttgaaggaagactctcctgtggactgcaacctgtcactgcaccctgtcatccatccagtaattaaaatctgactgatttactgactggtaccgaccatcatagctctggagttagctgatgttcatctttcccaaggctaaagttacttggtgaaaagagaccgcttgctcccaagctaagctgtcatacagctgcagtggagaccataaagatagctaacagagccctcaccagccatctttagtttattttattctaatatttatcacctcccagcaaatgaacataatacagacaagttagggagaggtgtgcaggctgatttgtgggtccggtgtggcaggccatctaaacactggacgggccacactgaagagcagggcatctccccgaagggctggccaacctacaaagacttgtgggttggggaagagtcttgagctctgaaaagtgaggctagctgtgtgcatgggaaagggtaaaggaatcagggtcccatccaggggtgctgagtttcctgagccacccagcagcctgtggggtgacctatcttctccatcctgtccttgcatagtcttgactttgctatcacagttccgggacgtggcccatcctggcccttcttgtgtaaggttacaccagagctcctgtgggaggcagcctctccccacatctccagagctgctagacctgggctctgcccccatgaactccctgccagccggctccttttctcctcttctctcaggatcacttattcattcattttgtgagcgtctgcatggggccaagttccacgctaagcacaggggtgaatttgtatagaacagaacaggcctgatccaggctttgtgggactcacagttcggtggaaagatggaagcattagacacataaaggcacaaagaagtgcatattaatagtggaggcaagggctctgaagaagcagagtgaggggaagagagacaagagtccacagacggagcaccatgcaaactgaggaaagagtgtggagctgctctctgggcagggcacagactagagagaggcaatggggtgcccggagagcaaattgcaaagagactttgcactcagggaccagcacatgcagggctgcagctgagagtgggtgcccccttcaattttcattctgggaagctcacccacctcagtctatcttggcacaaattggataattgtatgtctctctctctctccctctctctctctctctctctcactctctctctctttcttttggagacacagggtcttgctctgttgcccaggctggagtgcagcggtgcaatcatagctcactgcagccttgaactcctgggctcaagcgatcctcctacctcagcatcccaggtagctgagactacaagcatgcacaccaccacacccagctaatcaaaatatatatattaggtagagacaggggtctccctatctgggagttgcccagtctggtctcaaactcctggcctcaagtcatcttcctgtcccggtctcccaaagtgctgggattatagccgtgagcactgggcatggcccacttctcatttttgctgaagcaaagagggctccagtactctctgcaggtcactgcgtctcccagctgacagccatcagctcgcatgtcttataaatcacgaaaccacacagtgatgcactcatacaactccctgggctgtgggtattaattgtgcatgatgatgtttacagaacaaaccaaaaatccatataacattacatatatatatgtatcattttttaaacaaacatcattataacgttacatgtcatatatatgtatgtgtgcatgcatgtatatactttttaaaacaaacacaatggctgttttgtcaagaaaattaagtggggggatgtagggagaaacatggggagaacgtacaagagataaggagtttccggggtctttgttccccttgccctctctgcttggggaggacttctgtcctgctgtttctgggacaagcagtctttggaggatggaactggggttgggaataccttcagggcttggagttggatcagataaatccagatgagataaactaatatgagatattacagaccatctggaaggactaggaagggtcacagagcaagtccacagagagcagacaatgagaaggagcaggttttctgacccttcccggggctctcctcaccaccctccaaaactaagggttcatttctattgtgtttgcttcctgttgtccttaagtcagagcagtgattctaggtcctcgtgaaacccagaacattacgcctcctaagctagacatcaataggaaggacacctaaaaactggagaccacagtacttctccaccaccaaatatgcagccttcacagtcccaactacctccttacatgctggtgcaaatcgggcgttccactcaggtctgagggtgccaccagccacctgcacacctgcgcatgctcagtggagctcagtggagctcaccggagcagtcgtgtctgccagacaaaagctatggctcttgggaagagagggaagatagcgacacagatccagttactagcaggaagcccagtttgttctcccgattcagtcccaagcatcccaaaggacttcaacttctggggagcaaagggcctccttcacctggttagaaaacctcgagggaagaagaacagcgggtgagaagagtggaaggtggtgtttttattttgagtaaatcaattggctaatcagggtgggattttccatctgggagttgaaagggcaaaaggagaacagttaatttttcaaaacttcactttaaaatacaagccccctgtttgtgagctacatttgatgcagagtctaggcgggacatcaagaagtggcgtcagggccagaactagcatagtttaaaagaacagcaagtaaattaagacaattaggcattcttaatgcccagggattttttttgtgtgtgtgtgtacatttttcttccaaaagagcctgcttgcaagacagaatttcttcttattttctttctttcatttcttcttttttttgcattcacactctggatttttccttgtatttctcttggggaatgcatagtttggtcctgactagggtgggtaccaggctgtcgctggtagggagcctgtcctgtcctaaatggctctcaaatggagtggaagggggaagggggaaggggaggactttttaaaggtacaaattccaccaactcctggagaccccaggtagaggtcagtaaggttaagtgagataaaaaagtgaaagcatttctggaaattcttaggaagaaaggtgctagataaattctagctacatttatgactatttttatggcttggcttgtaacactgtgggtggtccctggacacggggctcattcattcagctcacaggaatcatgaggttgagatctgcaaacagatctggctctggaatggtggatgggatggggagatggctccagcagacacctcactaagggggcaggaggtcactgtaaaacaggaagatcagctgtccaatgatggaaggcacatttctcaaatgtttctgaccgttacccatctagactcaggcacacattcaccctcccattcccattcttctgtggtgagagatctggtgataacaaatggagaataacaaaatcagccagttgctagtaacacacataaactgtgtattatttactctatgagagatgaagataagcatatacacatttggttttattttataaaacaatgcctcataaagtaaacactagcccagcaattttattgcatttaccttgataatatgttgcaagccatttaaagagaacaaattcactgacagaccatcacccatgaagtatggctatacaagcacaacagtttggggataaagtataaattggttttagcattaggagcaaagatgattcatacggaaatcacaatgcaaacaggtcttcaacttaaataacaaattttaatttagaggtcgataatacttttagccaaaaatgtgttcctgtctacattgtagggttgaggaacaaactgcagcaaactggtaaggatgcaaagtttaatgtaatttgtaaattgtaaaagcaagatcggcagctttgaaatatcacgatctactcaagagaccagtcatagaatgaccttccagaaagtcctatactctgtatggggccaggtgcaccagaaactctgccctgctgccatccagacttggtagaagagttctccacatactctagtatattcttaatttttatttatgaattcttcattacattaacccaagaaccttcctaatggattactaataagtagctctaggtaacatgtgaatctaaaagtggttgtaattcacctgtaattcaccagcccaggacaggattcatcccctcatgtggatagtggtggccttagggcaaaagtaacaattaccgaaaagaaagtgtaaactaagggttataggagtttggaggaaagaggatacttttggctgggtggaagatggggagcaggggataacagggataatagcttaggggaagggccctccaggaaaacagacccccaggagcaaagtcttggggtgagaaatgaacaaggggagaatgagtgaccctgagtggctggagaggggtgtgtacaagaggaaatcatgggctggaggactggtcattatctaatggatgatgctctgtctatggaaatccagccaggcacagaggctcatgcctaaaacctcagcactctgggaggccaaggtgggaggatggcttgaggccaagagttcaagatcagcctggacaacatagccagacactgtctctacagaaaataaatgaataaataaatatagttagccagacatggtcatacatgcctgtggttttagctactcaggaggctgaggcaggagaatcacttgagctggggaggtcaggctgcagtgagccatgattgtaccactgcactccagcttgggcaacagagcaagaccttgtctcaaaaagaaaaaaaaaaaaagaagaagaaagaaagaaaagaaaaggaaaacacaaactagaaatccaactaagtggtatatttgcaacataaactcttctgattctgacaccaggaaccacgttcatgcagaaagctttgcttagttactgccgcaccccaagaataacctgggcacaactgcaagtggacatgcacagtccagagatacagtgaagatttagtttcccaaagtgatagactttcctgtccagaaaacctgcagcaagatcccagtataaggatcgatagggactatagcttaggaaaacctctttaaggaatataaggactttaaaatctcattaaaaggattacaccttaggaaaccccaccccctaactcagggcccaggggaacttcttggaaagagttttgtagaagcaattactttgggggcttcagctccttccagtcacacagcagattaggggtggacacagagttggaaaagagaaaaatcaaataaatgagtgggaattagagggttttttttctttcttttttttttttttttgacatggagtttcgctcttgttgccaaggctggagtgcaatggtgccatctcgactcactgcaacctccacctcccggttcaactgattctcctgcctcgggctcccaaatagctggggattacaggcatgtgccaccaggcccggataattttgtgtatttttagtagagatcgggtttcaccctattagcaaggatggtctcgatctcccgacctcaggtgatccccccgccttggcctcccaaaatgtagagctcttctttaaagtcttgttcaatatattgaaatttttcctgtatcaaaccaggaaccttggaataaagaactctgagtgaatccagtctctaccaagtactggctgcatacagttgggaaagatagcaacaccatcggtactttgttctctttcctacaaaatgggagggatggcaaccaccctatagggttccagagaaaagcaaagggactaaggggtgaggaggtcttcagtacactcaaagcctaatgcaaatgatgggtgtgctcatgcctatgtcagtacacctctcaacaaagagaaagaagaatactccagggccttttaagcacacactggatccttgtcctggacttagagaacaaggcagggtagaggtaagacctgaaaccacagtccccattatgagctcgcctcctaaggacatgctgttgcttccccagaatacacaaagacacagctgacttatgatgccttgatttatttttaaaatttatttctattttattaatttttattttattttgagataagttctgactctgttgcccaggctggagtgtagttgtgtgatcatggctcaatgtagcctctacctcttgggctcaagagatctttctacctcagccacatgacttgctgagaccacaggcatgaaccaccatggctgggtaattttaattttttttttaaattttcgtggagacagtctctaccaagtactggctgcatacattagggaaagataccagggtctggctatgttgctggtcttgaactcctggcctcaagcaatccttccacctcagcctcccaaagtcctgcaatgacaggcactggcctagttatttatgtatttatttattttttttttttaagagaaaggccacaacagaagggctgtgttttcaaccttattaaaaagcaggcaagggacatgaacagacacttttcaaaagaagacatacatgtggccagcaatcatatgaaaaaaaaaaaaaagctaagcatcactaatcattagagaattgcaaatcaaaaccacaatgagataccacctcacatcagtaagaatggctattattaaaaagtcaaaaataacagatgctggagaggctgtggggaaacaggaacatttacacactgttggtggggtgtaaattaattaaactattgtggaaagcactgttgtgattcctcaaagacctaaaaccaactatcatttgatccagcaatcccattgctgggtatataccccaaagaatataaatcattctgttataaagacacatgcacacaaatgtacactgcagcacttttcacgacagcaaagaaacggaatcaacctaagtgtcaatcaatggaagactggataaagaaaatatggtgcttatatgccgtggaatactatgtagccataaaagagaagatcacatcctttgcaggaatatggatggaactggaggccattatccttagctaagtaacacaggaacagaaaaccaaataccacatgttctcacttataagaagaagctaagtgatgagaacatatggacacatagaggggaacaacacacactgaagcctatcagaggatggagggtgggaggagggagaggatcagaaaaaataactagtgggtactagactgaataatctgggtgacggggccgggtgaggtggctcacacctgtaatcccagcactttgggaggccagggcaggcagatcacctgaggtcaggagttcatgaccagcctggccaaaacagtgagactccatctctactaaaaatacaaaaattagctggatgtggtggcacatgcctgtaatcccagctacttatgaggttgaggcaggagaattgcttgaacccgggagctagaggttgcagtgagccaagatggtgccactgcacttcagcctgggccacagagctagactctgtctctaaataaataaataaataaataaaataatctaggtgatggaataagatgtacaacaaacccccatgacacgatttacctatgtaacaaacctgcacttgtacccttgaacttaaaaaaaaaagttaaatagaaaataaataaataaaataaaatctaatggaaaattggataaaaaagaaagagcagtgttttcaacaacactcccccatgttatcacactgagcattgtttccaaattgattatgttctttaatcaaacaccacactagcattcttaaaagcactgagaacaaagcactaaagagttctctgccacagtttggcttttctttcaatgtctaatcaaatctcacatatttcctactgtctccccagaggagttctgggaacttttctttatattctcatcacataacccaccccaagagacaggaagggagaaaggaggatggaagaaacgaaaggagagaggaagggaggaaacaggataaagaaatgcagatgggagaaggttagaatgaaggagccagcatcactggactgaatgtccctgcatccctgatctgttcagtgggacacaggcagccagggaggcagcccaggagcctcagagaccgctggtagtggtgtcctcctcagcacttcttccctgcctcccgcacacctgagggtcaggcccttgcatctaattggacagctgggttggtgaacgtggcctgttctgccagccgcctcgtcggccacagtgacagctgtatcacttccctgatgtgagtgggcgctgagaagcgttgacacatgatcaacttccctctaatatccttcaaccaacctgacagttgtccggcaggggctagtcagctcgcctgccagccctcaccgaggcattgtgggacagcttcctaaggaatacagtcaggagagacttcaaatgaggcctttgttttcccctagtgtgctaactggggaattgattcaaatcctgagggtgatggctatgataggggctgctacatagggcctggaggaatgtaggtaacagcaaatgatagcatttgagagggccactccatcttgctctaagactagctgggtggtctcgtcgatgcaggatgtggttcagaggaagacttctatcagggatttgcagttccatagcaacacacgcttttttttttctattctcacatatctttccatcatgtagtttaaggtggaagaaacactctctcgtaccaggaaaagtttggaagcctcaaagttgtaagcagaaacgtctctgtctttcccgatgacagccacagtctgatggctctatcctgctgagcatcttgtcatcacccctgccaagtctcttagccagggggcccctctctctcgctcacccactagcaggaaggacaaggctaagtggggatccaggaagcatgggttcacttaaggctctgtcgctatgctaagtgaggccagagacatcttgcagcattgatgaagaatctggcatccagtgactgtcattctttcctctggttctgacattctccagatgtccatgagcaggagacgaggacagcagcaaactccagcttaacataagatggagaggctgttgggatttctgagggaccagagatcttttggctgcaactcagaggagggtaagaaaggagggctgttactaccgggatgttggggtggctcaaggaacacattcgccagaatgcagctgggcttcaagaacaacagaggccagacattccaacaccaccagtggcctctgtctcttattcctttttaactctgaatgtttgcttctcagccctactccctgttgttgccatttaatttttctttgtggttaaaacaaaacaagttgccagcaccccctaagcttcaataactacagtgcaacttaaaaagaaaataatggcctctttcactcagtttcacgtttaaggttctcaagaaagcacatgattggctcagcttgattgtgggtcctttgctgagccaataaactgtggccagggattgtgtcatgtggacaaacatggctgctccttgggaagcaggtagatggtgggtggtgagaggcgttcccagaagcacaaagtactgtgctgaggaagccatggctgacccatgctggatggctcctatgcccaaggaggctctataagaaagttcactgatgtcagatcaaacatggaatttgatctatgtaagatttggtttaaggttgtgattgtggttaaaatgtcattttgctcagcctgtgagacataattcagaaacattaccctccaaagaagccagtgagataactaaaaattcagctgacacccatgaagaaggagcagaaatgactctttggggatcattaagcaaacctgtctccagaccagctggggcaaactcagaaggcaagaagccaagttcattctccctgtggtccttgcctgttttccatcctgtcttctgttctccaagtgggcccatggagtcagctggcttccagccccatgagttcccgcaaattgagtagaagccagccctgtggtcaatggctgtggcaagaggcctatggaggcttccatgacatgctaaaaaaaaggctggcttagttagcaaacatggccctggggagaggacttgtggatttgggatctcaccctggctgctccagtgcagagaggaactcatggagaggccggcagaggaagtgagcagagctaatgttcaattacgtgcaggcaagctgtgatcaatgtgcagagaagaggccaggggaccaggctgggagagctgccaaccgcacctgtgaaggaatggtcaggaaccctcccaccctgggatgcattcctggcttttaccagttattcaggttctaaagaagtcacccttgagaactgtttgtgaccacttcaaaattacaagcttcccacaaaagtctgatttatgaacaatctgttagatatttgattcagaacaccttttcggaattaattaatctatctgaagggggggaaaaaggtgttttctttttaaacgtcaagtttctgtcgtggccattttctatgcagaagaaagaatcttttgattaaagtcagaacttctcccaattggggttacccagcacccaaggaagggcatccaatctaagctcttctgatgacgtacttgggcttggcatgtgcctaattaccagacacaggtcctttcatttctgtctgagttctggcacggctgaagaacattaaaacactgctcagagtgtgccttcatcctttctgtgatggggtggccaccaaccagcccgccagcacaggactttgggatggcacatggcagcttgcattcgtctccacgacacactgttgggcactgtcaggggatcagactggtagctgtgcaggaggctgcttgctccgataattaatttcctctccagccagccccttctaccagttgtactacccagaactctgccctagctttgtttgcctgcagctctccctaccatcccacctgccttctccagcctccccgctccaccctggcctatcctccccccaattccctggacgccagccttcagccctggcatgtctcctgtcagtcaccctctgaggcccaggcttctcttcactttcctgaccctacaccggcagacatttcctggtgacagctttgtgattcctctccacatctccaccgtgatgtcctgaaaacacggggctctaaagaggcctgcaggcagacagcaggaaccgagaatcaagcccaggccccttgtcattcagtccgattctgccggccactggcagcccctggtttgaagttggaggttacagtgactgctattcctctctcctcttctccctctctcctccacatccgcactacacagaacaggtctccttgtttatcagcttgaattgggaatgtacatggcacatgccttatctttattatacatgataacacattttccaagatagatgatccgctcttagtcacctcaatacgcacctgctacaaactcccaggctcagattcaataaacatttcctgggcactgagtgagttccttgattcagaggcagtgaccaccatgcggtgcttcagaacaaaggcaccagccacaaagacccaattcaaatctcagctttaccacttcctagccggatgaccttgggcaagtaacttcatctcttagtgtggtgcctggtctgtaaaacagcaataataccccctaggctttctgtaagtgtgaaatgagcaaattcacaaagcatttcaattagggcctggcccattgcaactgctgcctaagcagctattattatttccaataggtaccatgatatctgttttctcattattatgagaatcttgtaaattatgtactactgtctgcatttggtttataaagacaccgaggatggagaagttcagatattttgctcaaatgtgcagtgttaattagcatcaataccagggcttgaacctgggtctggggagaacctggccagctctctttactctggccatgaagtgctgggtactttgcaggtgcatatgtgcttcatcaatatctgtcaaatgttgtgtaatcgtctgttttcattcatattcacaactctgtggacatagagtggttagccattcaggaaagagtgagggtgttctgacctggggacatcaggcttggttcccgggcactggccttccctggaaagaccttctgggaaaactgaaggctagaaagaagcttccccattcaagaaggaaaatcctgcaataagtagccctggagcttgcattccttttaagaaggggtgaagaatcatacgaggcacagcacgcaggagtgtggggtgggaagatggaggtagcaatgcctcagctggccagcacaagaggcatttatgaaaatcaatccaggccaggcgtggtggcttaccctgtaatcccagcgctttgggaggccaaggtggggagatgtcttgaggccaggagttcaggaccagcctgggcaacatagcaagcctctgtctatacaaaaaataaaacaaaattagttgagtgtggtggtgcacacctgtggtcccagctactcaggaggctgaggcaggaggattgcttgaacccaggagttcaagtctgcagtgaaccgtgatcacaccattgcacttcagcctgggtgatagtgcaagaccctgtctcaacagcaacaacaaaaatcaatccacaaatacacattcgaaacttttcctcttctctcccgaaccatggccaccgactagctcaagcctctagcatctgtctagagtgtgctcacttccttacttgcttgcggcgtccgggcctctctgcccaagggcagccaggatgaattctagaaaatgcaaatccaggccaggcatggtggctcacacctgtaatcccagcactttgggaggccgaggcgggcagatcacgaggtcaggagatcgagaccagcctggccaacatggtgaaacctcgtctctactaaaaacacaaaaattagctgggtgtggtggcacatgcccataatcccagctactcaggaggctgaggcacgagaattgcttgaacctaggaggcagaggttgcagtgagctgagatcgcgccactgcactctagcctggtgacagagtgagattctgtctcaaaaaaaaaaaaaaaaaaaaaaggaaaagaaaagaaaatgcaaatccactcatgtcttgctccccagcccggccctccagtgtattcccattggctcatagtgaatcccaccgctttgctcagtctcacccagctctccatttcttgccccgtcatgctctcctggtctctgggctgcagctgtgggcttcctgctggacctgacacctgctccatgaccctctcttgcagcctttgcacctgctcttctctctgcctggagcaccccttatccccaaacccccaaggtggcccttttctccactgtgggttgcagagtacatagcacttgcttaaaaacatccctccggccacctcattctaaagagccttcaagccccgtctcactaccagattcctgcctcactggcattgtcgcatttgtatcaatagttgaaactgtctttagaaaaaaaactacttacatgagctccttgcaggccagaacttgggatttcttgtctatttctggcactcagcaccagaatgggtgaaggtgctccataaacacttgtggatgaatgaatgaaatttcaacccaggctttatgtgcccagtgcttgactgtgttttatggggaacagaaatacaattgtgtctcaaatcctgcccccagagagcttctggttctgagcagatatattcaccagggagtgaatacttcaggacagggagtcaaacatgtatgtcaagaagtcctagagggcagaatgagcggggagtggaattcctgggaatgtcttggggagtgggctgcagatgggtttaaagaatgactgggctgggcacagtggctcatgtctgtaatcccagcgctttgggagtctgaggcaggcagatacttgacatcaggagttcgagaccagcttgatgaagccccgtctttactaaataaataaataaataaataataaaaaataaaattacccaggcatggtgaaacatgcctatagtcccagctattcaggagactgaagcatgagaattgcttgagctcggaagttgcaatgagccaagatctcaccactgcactccagcctgggtgatagagccagactacttctcaaaaaaaaaaaagaatgatggcactgagagacaaagggaggaacaggttaggcttcccagcaggagaacgaccacagcaaaggcctgggtaggggtggcaggggccaaagagaggacatcgtagagattgcctttgaatagaggaggcagctgttccattgatgctgagtaaatgctttgcatatactttctagtttctcctgctgtttccctgagttagttccatcaacctgtgatggaatgcacaatatcttgatgtcattcttttttttttttttttttttttttttttagagtagggtcttgctctgtcacccaggctagagtgcagtggcaccatcattgcttactgcaggctcaacctcttgggctcaagtgatcctcccacctcaccctcccgagtagctgggactacaggtgcacaaccatgcccagctaatttgtgtatttttagtagatatggggtctcactgtgttgcccaggctggacctcatggcctcaagcaatcctcccattttggcttctcaaagtgctggcattacaggcataagccaccacaccaagctcctgattttcattcttatatctctcagagatttttagtgtcacttgccagagggcaccagggccagagtctaatgcccagtactcaatggtgaacatttttgctgtgccaagagagaaccactcgattagaggtggctactgcaggctttggaagttttctacggtgggaaccaacaatccgtgatccgccatggtccagtgcatgcagccttggcttctcttccctggacctgggaagcctgcagatgctggaagcagcccagctgtggcccctccactgttcttgccccttatgtgtgggtgtggaaagaactctcattcagagacatggtgattttgggatggagacgttgcttcctccaaccagactgcttccttcagtttccactgcctgggctcatgcatcagtaagttctcctactagaaagtttatttgcaaaaagccatggccatttgctcacaaagctgtgcccacttttgtctgtgtcttttgcccatttttttttttttttttttttgccaaatgtagggtttaaaataaaattcccgtgttacttccctgtaactgtcataacaaattccatgcacttggtggctagagacaacataaatgtgttctcccacaggtttgggaactggaagtcagaaatcaggagttcgagaccagcctggtgaagccccatctttaccaaaaaaaaaaaaaaaaagaaagaaagaaaataccaaaaatgagccaatgtctacagggcttcgctccctctagaggcttcaggggaggacacttccttgactcttccagctcctggtggcttccatgttccctggcttgtgactgcagagttccaacctctgcctccgtctttgccgggccttctcctcttctcccacggaggcagagaagcgtgtcctctcctcttcagtctcttacagggacacttgtcattggatttaggatccacctggatattccagaatggtctcatcttgagatccttaactttaaagcacctgcaaagactctttaacaaagaagttacatttgcaagttctggaacatgctcatatctttttggaggccactactaaaccccctacaattctctttacataatttcccaaaactgtttcccaaaaagttgccagcagtaaccaaattccagaagtgaaagcatgaccctggcccatggtgacaaacccgctttctaccaagttgatcaccacctaactgttgattctagcccttctaatctttagcctgtggtagcaagccaggtacaatttggcattaagatctaagaatggccaaagtctctcattgcacgcagtgctaccctgatgcagtggaaactacactaaacaagctccgtgggatccttgggccttctcccgtctccatgactcattggctgggagactttggaaaattttctctgcttctgtgaacttcagtctccctatctataaaatgaagactagattagaacaggggttgatatgctatagcttttttttttttttggagatggagtctcgctctgtcacccaggctagagtgcaaatagcacaatctcggctcactagaacctccacctcccgggttcaagtgattctcctgcctcagcctcctgagtagctgagattgcagatgcctgccaccacacccggctaatttttgtatttttaatagagatgggttttcaccatgttggccaggctggtcttgaactcctgacctcaggtgatccacctgcctcggcctcccaaagtgctgggattacaggcgtgagccactgtgcctggccagcctgcttttttaaataaagttttattggaacccagccttgtccatttatttacagatcgtgtatgggggctgtcatgctgcaagagcaaagcggttgcaacagagacagaatgactcagaaaatggagaatatttgctggctagccctttacagaaaaagcttgccaccccctagacaagtacagagctctgtaaagggcccttctagctgggttattttgtgttactatggaccagttcctcatttgagccctgcctaaaatctgatggtggcctgaggagctggctatggagagggagcaggactgaaaaaaaggctccatcagcctcacagtaccagcattgcccctccccggacatccttgtgtgcaccgtgcttccgcattgcctgcgctcccagaatttagctcccccagatcttccaccctgttctccccttggggcttgccccctgcaacgggcaggaaatgcagacagccaggggacttgtgggtccctttaaggccttgagacctggggaaatcccccagttctcagccacctaaggacaactcattctcccagtctaagggccgagtcattctcactttgcttctatcactgtccagattccagcaaaatacacccttccacagtcaaacctctacctccttcattctcctctcttatttgttaaacaaatcctgatctgcctttttaggctgctcttgaattttatggcaacatataataaacatctgactgcttttatttctatttaacttttatcttgaatgtctctgctgtttcaaaccaaatatttacagcatcacacagccgctgcaatttcattcctcaccaatactgtcactccctcctgcttgcactcaccagccccgtagagaggccgggaatgttggggcgaatggtctcttgtgcccccacagcagggcttccagactggatctctgagtcactggactcccgggagagcagatggctttcctggcagcctggccctcagctcggagtcaggccatctctggtgactgaagggctttctgtacttggtgtcttcacacatcggtactaggttgggtctggctgtgagaaagaccctcgcatgctccattaaggagcaaacctggggaattcgagcacctctgtcttctcaaaggcctctctttttctcagtaccctcaggtttggcccaaggcctcggagtgcagctccttggtccacctgtgcttgtccctgcttttctggcccaccaaaaagtgctcctgacagccctaaccacctactcttcaccaaggctctctggtcctgtgtggtccaaaaggccgactgcagatgctcttttgagtccagggccctaaagaaagcagtcctacctggtgggggatgacactctggacctggagtctgaagacctcgttttctgtctctgagcttcagttttctcatctatgaaatgggaatcataacacacgcttgatgtgactctcagggctgccctaaggatactgaaaaatggcgaatgacggcgtgctttgtacacagtgggtcgtccaaggggagccagagagtgcctctttctggcatgcctgagcctccggagctggagaagcctcctttggtctcctagactgccttttctcctcccatctgtctcaacctgcacaaatcctgccgggctctgcacattgctctgtgttgacggatccaccatattagccttgcctggccctttccttcgtccttagaagactcatgactccagctgagcttatgggtgaactctttcacagcagaaactgctttgcccttccttccccatgggccttgtacctggtcaagcctgcatctttcagctctctggtcatccagagggaagtctcacatgagtcttggtgagaatcttcaacttggccgtgcaagttttctgatactttcaatccagttcaagataagatacatacagcagtcacacaccctgaatctcagattctcagaggtaagataacctccccgacatgtcccacccatggggtagctctttccaaccccactagaaagtcattgttatgtagactcgatgttactgtactccccaaattcatatgctgaaaccctaactcactgtggtggtgtactagtctgttttcatgccactaataaggacatacccgagactgggtaatttataaagaaaacgagatataatgaactcacagttccatgtggctggggaggcctcacaatcatggtggaaggggaaaagcatgtctcacatggtggcaggcaagacagaatgagagccaaatgaaaggggtttccccttataaaaccgtcagatctcctgggacttcttcactaccatgaaaacagtatgggggaaaccacccccatgattcaattatctcccactgggcccctcccacaacacatgggaattatgggagctacaattcaagatgagatttgggtggggacacagcaaaaccatatcagatggtattagaaaatggggcctttgggagatgattaggtcatgagcatggagccctcattaatgggattagtgtccttagaagagaccctcagagcttttttgctgtcttcccaccaaatgaggatgtaacgagaaatggacagtatacaaaccggaaaatggccctcgccaggacctgaccatgctgccaccctggtcttggacttcagccttcagaactgtaagaaataagtttatggtactgcgttattgcacccccaatgaactaagacaacccacaccctggcttgtctcaggacaactctgaaggccactccatctctagagctccctacagctttggcttagaccttcttgagactacactgcagcccaactcctccctcagctcagcccgcctccttcctttccctacagtgttgatcacaagaacattcccgtctaaacattctgcacaataatctccatctcagagcctgcttcatggggatcccaacccatgtgacggtagccaactgtccttctttgtgcaggagtcctttattctgagagtacatcctagctacctttagggtgtgaaaatggtctttctgctatgaaatggtggcacaatcagatgcgtgtttgtgttatttttccctgtattttacttagcaccaggggccactggccacctgagggtggtcccctggtttcctttgatggtgtgccaggatgtcagatttaaaaatccaaggaccaccacagcttctcagtcggttctctgtctcaagagcaaccagatgaagtccacacacgtgatgccccgctgccttctcagataaactgtgggtcacatccaatttcagaatctagtggcaagtgcatcacatgccctctcaagaaggcatttccagtgggtgtctgctgtttctttttcacctctcctgtattcactctactttcttttggagagaatgctgcaatttttggggggccccactccttacctgctttcagtccctgtgtttgggaggaacgtgccttcctcttctcccgacagcagagtggtgatgtgggcgtgcaacccatcacagcatttcatcccctaaggcacagtgatcgggttcagagatacatatgtcattgggacaggtcaacgacagtgcaaccagggattttgttggcactgttgaaaataagaaacccatgccttcatctgttttgtgctgctataacagtatatgagggactgggtaatttataaagaacagaaatttatttctcacagttctggagactgggaagtccaagatcaaggcaccagcatctgctgagggtcatcttactgcatcctcacatggcagaagagcggaagagtgaacccactctgcaagccctttggataaaggccctaatcaatttgtgagggaggagccctcatggcctaatcacctcatgaagaccccacttctcaacactatcacattggaaacatcagaattttagagggaacacattcaaaccatagccaccctctgtccagtatgagtgctaactgtgagaacagggtaaggccagagctggccatgaaaccaaagcagagatcagaaccaagagacgaagaaagtgggagactgatctctgttaattttgctttagtatcaacctccagcgccataccagaagccatgcatgccattgtactttccacttatgtcagctgatacatttccttttcttcccttgagtcaattgacttaagtttttgtcacttgcatatgaaagagtcctaatggttatggaattggagaatgtacaagctaaaaggaacttggatttgctccaatattaaatatgaaatgagatcatctgtacacactgaaacttatagcaaagctgacaaccctaagtcacaattgagagccatcctttctggacaaggaggtccattcattactgcttaggccttcctgactcactgggtcacagtttctaccaccattggtctacatttctaagcccagcccttgataattgttagcctagaaaacagggtcagaaaacacagcccactggccaaatcagatctgccacgtgttttgagatggcctatgagctaagaatgtttttttttacattttacgatggttgagaggaaaaaaaaaaaaagaagttcaatattttatagcatgtaaaaattacattaaattcacatgtcagtgcccatacataaagttttattggaacacgaccatgctcatttgtttatgtatttatggctccaaacagcagagttgagcagttgtgatggagactgtacagcctacaaagtctaaaatatttactatttggctctttacaggaaaagtttactgactagtgctgaaagtctctggagatgtgaccttcacagtttggtatctagctttgagaccccgtatcaccaacaatgaaaagcacttcccttgaaataatttacatagttacccaagatttagacagcagacatctcaggatgtagaggatttttttcagattgtttccaggacctagctttgagccaaacatacagtattcctgcaataagtctttgctgtgtaaaaacaaaaatcgaatgttaaattaggccactgacccttttaagcccaaagcataaataaatacagaaaatgtgaatttgccattattattatttttatttttttgagacaaaggctcactctgtcgcctaggatggagtgcagtgacgtaattttggttcatcgcaacctccacctcctgggttcaagcgattctcttgcctcagcctcctgagtagctgggactacaggcacatgccaccacaccggccatatatacataatattatatattattatatatactatagaatatataattatatatatagtataatatataataatatataatattaataatatattatatattataaacaaatatatatttaaatataaatttatatatgttatatatatataaatatatatatttagtagagatgggggtttccccatgttggccaggctggtctcaaactcttgacctcaggtgatccacctgccttagcctcccaaagtgctgggattacaagtgtgagccacttcgcccagctgatttttaaagaagatctatccaggtcttcttggagcagaattatgtaggcatccaggaatgcgagttgtgctgccaagtgacatttctcttcatgttttccctccctggcagagtcgccacttgatttaggatctgacaccatgggtagatattggaattccagtcttagcctgcaagtcacacaatgtctttgagcttcagcttccaagcctgcaagatggggcgataagagtttacctcctgggagttaagaggattaaataagttaacagttaagtaaaagtactctgaaatgttagcttttattttcatccttccctccttgtgtaagaaaataatgtaaatagcctttattgctcttagtttttcttgtaaaagctgtgggaaggtgaaataacctcattgaaatagagccattcataagtagggtagatcattaaccgctatgagatagatgattatattccatcaggttccaagccgacagcacccattttacagtttggaactgtgaagtatttgtactgtgtgatccacagctcttaaactttccaagacttagtcagtccttaggttccagacaaactttcatcccacctacacccccaacctactctcatcagggttcccaatgactgccatattgccaaatctaatgatcacttctctgcctgtatcttactccgtctctcaacagtatttgaaagaattgatgatgccctccttaaagctcattctcatgtggcttagaggacagacctagcctcctacaccactggtcaatcctgaacttcctttgctgcttcttcctttttctcctaccaaccttttatttttgttttaatttaatttacttttttttttttaagaggcagggtctcactctgtcacccaggctgaagtgcagtggggtgatcacggctcgctgcagcctcgaactcctgggctcaagcaatcatattgcctcatcctcctgagtagctgggactatagcaacataccaccatgtttgactgtttttttaatttttattttagtggagatggggtcttgctatgttgcctatgttggtctcaagcttctggcctcaagtgatcctcctgcctcagcctcccaaagtcctaggattatagtatggacaactgaacctagcctcttcccaacctcttaatactacagggccacagggcactcttgtcttttcttcttctatatgcatattctaagtcacctcatatcactccataatgttcatgtactggctacttgcaaatttcctgcccaacttcaagctttcttctaaatatcagatcctgatgaccgactacctctttggacatctcttaggcatctgagccttgccatatataaaacctaactcttgttttcttttctcaaacctgatctttcctcagtcttccccatcttagcaaatgatccttgatgtgggcttaggggaaaaagaagaaccaaggatgatcaaagcttttagcctgagcaacctagaatgttcacatgtgatgctcttttcctaggccctgtcattaccccccattagatgaaggtgcaaatgtggatatgcatacacagaggaacatagactgtatatagatttgttattatccctccatctcccctacaaggaagtgaactccctgagagcaggacatttatgtcaggtcctgagaaaccacagtgaacaaaatggactggcacatagtaagagctcctcaaatatgccttgaatgactccctgaccttgtagaacaaaaatgcttcctgggtctacagaatgagaataggccacaagagaagcgggaatgaaacttggaaactcaagcatgagtgcatttttaagacgagagtgcatttttaagacacatctctgggctgaggcaacgcatttacacacatgtactgtttttactgaattctgaaccagagagctagatggatagatgatagataattaaattggttccaatgacagagagctaaatggatgtttgtttttatcatgccaaatgatcatgcttattttctgaaattttcacttcacaactgcttgttttggtgtcaggtagatacatttaagttatcaaaacttgcctgggaggagtgagaaaagagtgtgcttcttgtctctgctatcagcaaatataagcccaccaggtgacaagtccctgccaagttccaggacagcatggggagctgtgtatgatgcactcatggagtctaaaatcaggtgggcatccaggttggaaagaaagaagtagaactgtctttattcaacagatgataagatcactgatatagtaaatctgatgaaatcaacaaaaagctaatagaactaataggtaaattttgcaagaatgcagaacacaagactgacataaaaaaagaattgcatttctatatattagcaatgaacaatcaaaactcattattttaaacatatcttccacaatagcatcaaaaacataaaatacttaggagtaaatctgacaaaagatgtgaaagacatgcacacggacaacaaaatattgtgagatacgtgaaaggagccctgaataaatggaaatatacagaccttgttcacaggttgaaaaactcaatgttaataagatgtaaattctcccaagttgatttaatcctatctcaatcaaaatcttagcatgctatgtgtagaaattgaaagctgattctgaaattcttatagaaatacgaaagacctggaatagccaaaacaactccaaaaaagaaatgaaagctggaaagtggatcttacctgattttaataatgattataaagctacagtaatccaaacaacatgatattgtcataaaggtaaacaaatagatgaacagaacagaatagagagttcagaaataaagctatgcacatatagacaactaacttttacaaagcaccaaaagcaatgcactgaaggaagaatagttttttcaacaaattaagttggaacaattcatttgtattcaactgtatacaattgtatattcatatacaaaaaaatacatttgaatccatacctcatatcagatgccaaattaatgtaaaatgcaaaactataacatttccaaaacacatagaagaaaaactttgtccttagattaagcctaaaggtctttcatacaacagcaaagcacaatccacagagcaaactgatgacttagagctcttagaaatttttgtttttcaaaacatgcactgttaagagaatgaaaagacaagccacaggttaatagaaaatttctgcaagacatgtatctgataaaagacttgtattcaaaatgtataaacaattttcaaaactttacaataaaaaaacaaacaacccattaaaaatagacaaaatatttgaacagacatttcactagagaggacacatagatggccaataggcacatgaaaagatgctcaacatcattagtcattagagacatgcacagcaaagccaggagatactacttcacacccatcagaatgactaaaataaacaaagactgagcatacccaagctgtggagaaaccggaactctcatacactcatggcagaaatgtaaaatattcacccacttggcaaaacagcttggcagtttcttaagaaattaagcatacctctgccatatgatccagctgttccacctgtaggcattatcagccaagaggaaatacaagtccatgcaaagatgtatacatgaacgtgcatggcagcttcatctataacagccccatattggaagcaattcaaatgtccaccaacagatgaatgaataaacaaattacagtaaatctgtacaatggaatgctactcagaaataaagaagaatgaactattgaaatatgcaacaacatgaatgactcttaaaataattatgctgaatgaaagaagctataccaaaggaaggacatactgtatattctgtttatataaaattctagaaaattcacacgaatctagtgataggatcattggttgcctggggatgagggattggggaggactgggagggagggattatgaaggggcatgaggaaacttctggaggtaacgatatgtttatttattgattgtggtggtttcacggatgcatatgtcaaaacttatcaaatcatatatcttaaatatgtatagttattgtaagccaattgtaacttaataaatttgcacttttaaaaaatccaagccagacatggtggtctgcctgtagttacagctactcaggaggctgaggcagaatgattgcttgagctcaggagataaggctgcagtgagcttggattgcaccaccacactcaagcctgagcaacagagcaagatcctgactctaaaaaagaaaaaaagtcttatgggaaaaaaaatcaatttcctggtaaagaatgccaactgctgggaagaaaacaagatctggagcaaggtgagcgtttagcagtggatgctgcgtagacctcaggtgatgcccaaggaaagtcaggcgatatttgaatagaactgaaaagtgtttactgtgtgaaaagctggggaagaggggaggaggtgagaaagaaagagaagggtgaagacctttcctgaaggagggagcagcttgtaggaaggctttgaggtcaggtggagtgtgttcctatcaggacttcagcacagaaggtacacagtgatgtgtatcaacttgattgggctaagtgatgcccacatagctgataacatattacttctgggtgtgtctgtgagggtgtttctaaagagactggcatttgaaccaataggctaagttaagtagatttgcattgaccaatgtgagctgtcaccatccaatccattgagggtcagaatagaacaaaaaggtggaggacgggtggattctctcccttctccagctgggacgtccatcgtcttctcctgctttgtacatctgatgtactagcttcccctgatgcttgcacatcagagctcctggttctcaggccttctggtttcaggacttacagtatcagctctcctggttctcaggcctttggacttggactgaattacactggctttctgggacctccagcttgcagacagcaggtggtgggacttcttggcctccagaatcatgtgagctgattcccataataaatcccctcttaatctatctgtctgtctgtctgtctatctatctatctatctatctacctatctatctatctattatctatctatctttatttatttctatttacctgtctgtctatctgtgaataccattccttctgtttctccaaagagccctgaccagtatagaagctgtgatggataacacttaactcactttactcaacttttttttttcttttcaaaaaagagagctttgggagataaatggttcaaattgttcacgctccaaacctgcaggtttttccaccatcagaaggatgaccataaactcacagttctggactcccttaggccaccaaactccccctgacttgagcaggcttgtcctccagcctgaacaaccccggggcccagtcacatctgctgagtggctgctctgtggaggcagcatgactggcccgatgggtacagacacagccactggcacaaggcccaccttgctctgctctgttcagtggcctcagaacactgcttaagctctctggacctcagggtcctacctgtagacagttcctttgggagaagaccatgacagcaggtctttgggaaagataaaattgtgtgtaactgcaaagggtgttcaccaaaggactttgtctccaggtgtggccaaccgctgtagagactctgggaccccacccagagtcccttgccagctagtgtgtgcacccatgagggtaggctgctaaaatctcactcctgcaccctcctctggaggactgccctcctccttacttacaaatgctgggatgatatgccctccctaaggaggggtccccatccaatgactaactagtggagagtggcaatggtcagaccacttgccttaaggaaggatggctctgtggtgtcattcaggtaccagaactccctgtggaatcagctgaggccagactccagctaggtccacagcttggcctggcttctttcccacccctcctttgcttcctgaacaacctcacattctccctgcgagcacccccttgatcaatcaaggcaccagcgttctagacactctgattctggagaaccctaacagagacttctgagacctcaacactctgagatttttttcttttttcttttttttttttcaaacagggtctcactctgtctcaggctagagtgcagtggtacagtcatggcactgtagcatcaaactcctggacttaagtaatttgcccacctcagactcccaaagcactaagattacaggcgtgagccaccgtgctggccccactcagagattattaacggcaggtgtaacatctttgccataagccatcccacctctgccccacatggagggtcccactgtctcccttcccagacctgccttggaacactgaggagcctagggcccaggacctgactcactcctggatgttttgttcacactcttttcaaaaaacacattctcaatagctttaatttaatcaaaacattcttgactaagatcattaaagcctctgagagaggcatttaattctaaattcaccatatccacggcatagcagttgagtaactgaaaaatcaactttatgtcataatagtttgttagaacgtttgtttactcttcatctgagacatgctaattaaaacaagaggccttcacaagcaatccagttagcaaacaggattggttaatagataaggaatggttgttaattacagggaagcccctccctgcccacatggattgggttgttcaatggggtccacggaatgcaacctttggttcatctcttccctcatcgaagacacttaggaacatctctgagaaacacttaccttggtcgggtctcgcctgtcaccagatctttctgaattcatcttgaagggaagtgattcaggacccttgtggatttctgtttccctagggcggagctattcccactctcccaccaccttgcctgttagcatgtggtcctaactcctgctgcactggctcctcacgcaggataaggagctgttgcagaaagtcccctgctaacaactggccctctgactgctgtaggagacctggccagccctactaccttcccacagacacacccccacatgttccagaagccagtcaatgggggcagggggcatgctccttactatgagttcaggaacatctccaaacatagacaccaaggggcccaggatgcatttgttaagtttcaaagtatcaaaccccttacccttccaacacggtttccactctgtctggcctttttctgcctttctgcataattgcactttcacggacaatttttcatctgcttccctccctcacaagtctaagaccaatcacccaatatcctgctttagtcctgcccagcaacctctccttctggcatattcccctcccttcagagccctgggtattcatgcacatccggccctcagccaggacatatactccctgctctccccagcccccaactcaggaacagggctcctaaccttcccgtagactccaagatgttagaatgaaaagacatcttacagacctcattttaaagtaaagaaactgaggcagagaggcagtgatggaggcgttgtcatatttctggttggaaggcgcaacccaaggccacgttgctatttttaatgtctaatccacattacaatgtacataagtcatgagctgattccaaccgtgttactcatttttgtcatccctgtgttgagttagttctcttatgcagagtttcagccttccagaagctaaaagactaatacagggagctgtcatgacaacgacaccatggtagcacttaatgaaaacttgagttatggaaatataaaatactgaaataaaaatattaataaagcctcgcttttatgtggaatttggaaatatgtgaacagcaaaaattttatcactatgaacacattagtcttgaattaggtgcattttgtattgaggacttgaagaaggtctcctcattgtgatgactgaggtggacggggactccaaaggctctttaagctttgaagagcacagatggcatcatttgtgcctgcagtctcccgcaggcctggcacaaagaataggtgtctggtaggtgttggacaaggaaggggtaaaggaatggatgttcctactctgaggccctgcagcctccagtcccagagctcgctttgggcagagccctgcagcagagaactcctgtaactgtggggacctcttctggaggggctggcgtctcaagggtgattggcttcctggcagcaaacacaggctccatgctggagtgtttgaaggtctacgtatcaaaagggaggaaatgattaatcatatgtagccagcctgctgagaggagggctaggaaaaccaggatgggaatcagaaagaagcgtcctcctggccaaggacgtttcctgccttcttacctccattagaggcactttcttctccgacctcagtcttttctgtgcaggaaatcctggcctttttagctgctgtaagcctttgcttgctactggtctcaggaagctgtcctggactgatgtctgaaggcaactgccacttcattctcactagtactttctgagcgctgaatacatctcaggctctgccctaagcacttctttaattctcccgataaccacatgagggaagtgccattatttctttttcccaagtgaggaaactgaggttctgagaggctaagggttggaactcacagctcttctctaagcaatggagatgactttggaaaccatttgactacaaaccatttacaccgtcttcccctcccagcctccgcccaggttgccagcctcacattgttgtggttcccctagtttcctcaaaagtcaggcagcccagcctgggggagatctcaggaaactccaagatcagcttctacatgactggaggccacagctgctaccaccactcaagcctggcagcaccaacgccaggccttggtgatggatgtgtgggccctggccatctgcctggcaccaaccagactcccaaatgccccagggattcagagtgtgccaggaatcccccaggccatgcctgtgctagtttctgcacctttgctcacttgatctcctctgcctggagcttctctttccttctctagcccaatccaaccccttttccatggtcggatccaatccccacatccccaactcttgggagtcctgctggcttcttccttcctcatgttccctgttggggtttggtgactcacataaatgttgtaaatgtgcatgatataaataaggaaaacagacctgtaataatcctaccggaactatgagggtcaatggtataggaggtccagactttacaagaactctcccattttgacgtaaattaatttcaacttataaaacactgtctatataaaagaaagtccatctttgggttaaatctgagctatgaaccaccagtttgcaactgtgtccaagagtatgtgtggtgtgtatcatcagagccagtattcaaatctgaatggcccagcgtgagtccctcaacttcctaatatgagtgactcgatttccccacaaggaaactcccgcctcctttccaaagatgaggaagttatgttgatcacattttccttgatcctctcactatcaggaacctccaaaccaaaactgagctaggtcacagaaattattttacccttcattttctcttttgttcttctatttttatgttttgtgctttcattatatttctgtggcaaactattggagaaatttcatgaaagatgtagggaagaattaaacacatgaattaagtaggtttcagggggatgtctccaaaccctaggaggtcaggaaacatttcctttcctgtcttaaccctgacctttttccaggtccagctgggcacgtgtattgctcagggttcattgtttgcaagttgcagaaagcaactcgggctggcattatcacagggggatttttttagaagaagatggagtaagtcagaaaatgtaaagcaaaaacaaaagaagaaaaagaaccagtcggggaaggatctgaaagcagagccatggcgggctgcattggactctgactccagttgcaacctgggattgatggattccaactccgctgcctgctgatcgggactcaaattcagagaagttggtattgcttggataacatttcctctctttatcagcctcgccaagacccttagaaaaagggagcctgaattccccggaggaaaatctgggcgaaatatagggaaagaatggatgtactaaatggatctcgttgaagtgtattgaactgagccaggcctggtagcgtaggagaatctagtgtgggaacgttcattcaattcatttctctatttcttgtggatccaatgggagccatcatggcaggatgaatcatgaccccagaaaggagccttcacttaggaagttggataaagaagaaagtggggtttcccagagcttccttcatgggtctgaaatggagcaggcctacctgagcctcagagtggctgccaccccctgcaaagcaaccataaatgccaccttctgtcctgtcctggactatacagttctgggcatgctcagtatcttgccacagggctcagcccacgcgacagtgctccagcatactcttctcatcccctgggttgccaacgtttaaggactccacaggtattgaggtgtaggggttaagaactcacatcgagagctgtcaagcccaggatctgagctctgtcttctccagttgtcaggttttaaaccggtctgattgcttcttttaaaacttccaatttctcatctgtgaaatgtggataataatgctgacctcataaaggtcgtcaggaggatatgaagatgttgaataagattatcttattccacaagtggctcctaagcaactactccatgctaccctcttaccaacctcgggggttgcagcaggaaaaggacagacaacatgctgccttcctggagagagacggcaatcacacaaataaatgcacatattatttcaaataatagtaagtacagtgaggaaaagtcaatagggcattgcagagatggagacccatcttcagcaaggagggactcgctgcccaactgcagggaaagtggttagctgcagagcagagctgccttgacaagggtctcatccttcctggggcagcctccatctgagaactaagtaaggtgcctgtaaacgtctggccattttggctcacggcgggatacgctgatgagtgattcttactcccaagccacccacgtcagttgcatttcttcctctgcacaatgtttctaccctcttccctacacaggggttgatccctctgaaacatcttgcaaccaaaactccatcttggcgtctgcttccttctgaagaactcaacctgggacacagtaagaggacagatcacctacctgtgaggacccctgtgattcaggtgggtggtcagggaaaaactctgcagaggtagcatgtaagcagaacccagaagcaagggcaggagcaacaagaccctgtgggggagactggtgcacagaggagccaagaaatactgcaaagatcgtggagaaggagacaggcaaggcccgtgtggtctggtgggagtagtaggagatgaggtcagaaaaggaagaggtgatcatatgatgctgtgaggtcataaaaattgctgctggcttttactagaagtgaaatgggaagtcacatgaattttgagctagcaagtgatgtcttatgtttcaaatggtgaattctggctgctgggtggacaatggcgtgagaggagaggagaagcagagtagtagtgtagaagggtgttttggtggtctagggcaagagatgaccacagttacctgttatatggcaatcgtagcagctgtggttgtaatatagtagtattgtggtaatactaatagtagttgtcactgtagtcgtggttgctaggtcaagagcagggagttttcttcaccccacagcactgggcttgccatgcagtatttgcaagcagctcctctgttcacggtccatctgcataaggcctcccatggtgcagtgagtgtgtgaggccagacctttagagatcacagcctcaagttttgtttgtctcattctggctatgcgagaacatgctgcacccaaatatgcaatttgcaaattctggcctaggtttgctgctgttcatttcattttccagaaagtttttacatccctttcagctgctgtatggttttcctgtgtggaggactggtcagagtatgttttcttccattcagcggctgtaaatcccaccctggatgtggcctggggaggctggacctctgcctctctgcacctcctctttggaccattccctttcccttggatttctctttggtcacaggaggtacgataggtcgctggccttctgcaaccccactcaggagagggatcctgaggccccggcttcagagaaaattccataatcaactagactgagtgatgtgtttaggaggccaaggctgatactaactataattcacattccccgggcactctgctccgtaataaagcctggatgtcagatagcccggccaagagctaacatacctgtttgaactagtcttgtgccaatagaaacacgtcagagaagaaaaacatttagccaactgtctgatgcaaatgggttcttttcagccaaatgaagaaggattgcctagacaggggcatatgggtatgttaaatgttaatacataataaagcatcacacctctttcctttggtgttcacaaggtaacgtcccataaataaatagagtgacgagcttttagaccctccctgagccacccaaagccagaaggaaactgggtgggccccttctccatcatgctaccacacggggtacccactccaggatgtttatgcacccggtgtcagaatataaaaatgtttagccctttccgtgtggaattaagaggtatgaatttgtaagtgactctgtttaatcaaaacctccattgaaacaccatttagcccaaaccctatcagtgaatttcaaaatacagattttgctggtaaaatagccccgtgttgccgtttcctcgtcaaatatgtatttagccccccgagaatcctttttactaagccggcagctccagcatgcacaatggtttaatcgtatattgttctctgagtaccaaccctttacaaatcatatgacataaaaagaaaaataagtaacattgtaaagacagtaatgagaactgttgagctaaagtgcctcttaaagaaatcctaataaattccagaatttctagtcttctggcaagctttccatttagaacaaaatcaatgatcaatggctgcaacgagccagcattaggcttgcatgcctctggagcagggaaaactcatagacgaaagatgacatttaaggaaaaaaagctgacattgagtccatcactgtcatcgcttctgccataaagcagcttcaaatattaaaacatttttcatctgtgctgcattattggcaccagaaattgttttctctctgtctggtgcgcacttgaactgcagcagcgctccccggagactccggattgttactaaggcctcataacatattggcagttgacgtggtggtgttcatgtacacttgccactcacacggagcctcccctcccccggcctgcacgccaagccggctgcaaggggacctgggctctgtggctcaaatgcgggggacagcgggtaggcacatgcatgctctgtgatttcttttttgcagtctgcctttccctggccacgaccccatccttgcccctgtctgatgtccaagctgcccctgctgagacagacctggcctcttctggacagctccagtcacataaggactccatagcttgtgtgggctcagagcactttggctgcagagaggaaagtctttaccactgggcaggtagaagctgcttttccttttgtactcctggacctagcactctgctttatgggcactgtggcccctgggctctgttttatgattcagagaaataaggatgtctcagcttctgttcctgtccttacaggactcactagttcgtgatgaagatggtgacacgcccacctggagagatgtacacggtttccttggaggaagcccacggcctggagtgaatcactcaagcagagtgttcgctgggtgactggtgtcccatgagggcaccaggcggatcacattgaatataaaagatgctccttgggggccctcttagctcttgccacatggaaccctgagaagggcagggcaccttgggctggaaggaagatgctgtcagggcgtgcacttgtagaagaggagaggcgccaccaggcaattcctgggattgcatggtttgctgagagaattggggccggggacctcgggagccgtcacgcttgtgtggtcctagacattctcaatcactcccaccctcgccctaaaacttagtcgggatgcccttttctctctacgtggggaccctgctctagggaagaagctgtagggggctggtgtggccgggctgtttctgcctgtctgcatcttacattttacttctggcaggcacttttcccagggactggaacttcagcctcactccctaaattctcaattctcccagaatccccagcaaccaaccaaggggagctccaggggctgagggtcagtgaggcacaaatggcaggtggatggcaggattcctgggtgtcccaacccacaccgcacccatgtggcccttgggtctcagcacctgcataccctggccagcgtggggccagtgtgggaccagcatggggccagtgggaacacagcagcaggcccagtgcttactccaacctcaggactgggcctggggagtggcaggttggactcctccaggaggcacagcacctagaacccatggtgctttcagggcattgaataaaaaatgttttcatccaattaaaacaggaagaggccaggcccaaaggcctgtaatctcagcattctgagaggccaagacaggaggattgcttgaggccaggagctcaagatcagcctgggcaatatagggagacctcatctttaccaataaataaataaataaataaaatgggaagaaaaaaataaatttttagaatcaaagatgtggtttgtcattacatccatgtggttgtaaaatacaagtttgagtttttgtttttcggaggaggaagaggctcacaaagactaaagtgcttagggccttgtaagagggggcacatggccagggctcagtggttggggtaggggtctctggagcctggaggtggcctcagagctaagggacaggtgcccccatgaaacaccccaagcttaatttgactccaggccactgtggcttctgaactgatgcctgggctctcggcatagaaagggggactatgagagggagatctggggtccctgtccctcctctggtcactcatttcactcagtgggtgggtgggggtttaagggaaggaggaagttctattctgcagaccctccaagtactgtgcacacatctcctggatgctgggtcacccagccctgaattctggggagctgctgtccagtaaagagatataagcagtccataaaagactgcagtccagggggaaatgaaatggatacatcagagggactggggtgaacctgctggaggctggagtgatggggtgatctgcaaggaggggccagagcaacttatgaacccaggcatccccgactgccacgcctgtcctccttcccaacacaggaagtctttgtgagttcgtctgcttgagcctttgctctggcctctcccccttggtcagatggcccctcgaaggcctccgccctctcaaagagcccttcctctaagcccatctcaatgccccccacttaaagagtgccccattatctctagcagggtcactgggattggttctaccaccaatacactggcaatcattttctgatctcttaaatagaacacacagtccccagtcccaagtggctggtatacagtgggtgcttaatacacaacagcaatcttgaggaagcttttagaaattagcagatgtagaccttcatactgagctactttctaacaacttcttaaggattattttttatttattattcttagagacagggtctcactctattgcccagatgagtgcagtggtgcaatcgtggctcacttcagccttgacctcctgagctcaagccatccttctgcctcagccttgtgaggagctagaactatggctatgtgccaccacgcccagctaattttgtttgtttgtgtagaggtgggtgtctcttttatgttgcccaggttggtcttgaactcctggcctcaagcaatcttccctccccgatctcccaaagtgctaggattacaggcacaagccatggtgcctggctggagctacgttttaagtcactttgcagggaccctctctgccctgcctgctcttggaagagtgagcaaggggcttctccccacccccagggccaccttacattttatttattgagagcacttttccctgggaccaaaacttcagcatcactccctaaactcctgactgtcccagaatccccatccagcaccctaggagcaatccaggagctcagaattcactgttatcccggtagagtgtgcatctttgcctgtcaaggtacgccccaactccaaggtctgccacgcacccccacccccagagcagagccacagccggcagggtgggaggtgcagggaggaggagctccttttccatctacttcggccaacacacagggttcaggcaggcctgtggacaaggcggaggaactcccaggcagccaggctggcttcggcgtgtggaggcgggaggggcacagccaggtgcgagggaaggctggcatctggcgcccactgcctgcccacccgcccgcccgcccgcccaagtaggtctgggcttccctgcctttaataaccatccccaccgcagaggaacggaagctagaaacacaccggctttggcatttcaggcgagtcgagggtggattatcagggcatttagaagaaggggaagggaagaaaaagagcgctggagaccgggagaccacacagggagacagtgcacagagctgccgcagccatctgccgcgacttcatatgccgccccggaaactgacagacactgcttcagcaaggcccagcccgtcagatgagtcaatcaatcaaaaaaattcttatgaaacttaatcatagagggtcatgttagggagtggggaacagattaaattaccacagtattagatacgggaaatgatttctgtcaaaaccatctttactgcaattataatatgttaattatgtatttcattaagtaagtggattagagtctgcacagatgaaatcatgtggaggctttgaatcattcgccgagcacggtgggaggacttctgtgaatggatctcgtttaatttggaaaacttttgcatgcaaaatgtgatttttttccccttcttttgtgaccctggccctcagcctcagtggagaaaacgcccgggttgctgagaggagaatctgctgactgcctcctccatgctctgaagtcagcccgtgaggcccgtgtgctgggagccagtcccgggctctttctgtcttgcttctttcagcttgcagtgggcaaagcgatgctgatggcctgcaagggggatgggcacctctgggtgcctgctcatcttctagcacaattaggcaaagtcttcatgaggttcaaaaccaaaggacaaccagtgcatcaagaagacagccagggtaccatatcctggtgcatccacgtgtcttctggccacatcgcatgacatgcatctgcccttttcatttggcctttggggataccctgcccactgggaagacagctttaagaagctcagtggagtcccttgcaagggagatggctgccccactacgggcaggatggcccacagcgcacggggcagacacaatcagattttttgcagcacatatttcaggccagctcttcaatcctctctgccattgggccctgctgtttggtaaaagggctatttagccacctggtttccaggtatctttttttgtagttctgaagcaaggaatgggcgttgggcacacctgtaccaccgaagtccccttgggccaccatggtgtggtctgtccctccatagatggaccctagtatcttgtccctgctcatcctcagaatctaagctggacatcaggagcctgcccatctcagcttcagttcaaggcaacagaggccaccaaggagaagaccttccatatctctgcaactcttctattcttcttggcttctgaagatcttctgggatgtaaggggcagttgagtcataaacgaaataagagttaatagttattcttcagaaagaggaggtatccagtgcacatacatttcctgggtccctaagtattccattatcagtaataaccacagggaagttttgacgaagaggagaaaagagaggaggcaggcggacagggcctgcttggagtgcatggcagtgtaagtgacgggaaaaggttggctgatttgatgaaaaccccatcagcctctctagggagatattactttcctcattattccactgattggccttatttcatctgaagaatgctgtacattctttacaggcctggcaagcttctttaacaatatccagaaaaaaaaatctatcacctccttaatagaaacaacaaagaaattaacatgagccatcttcttccagggatcagtagagagacctggcctgatcccctttcttctgacctagccacccagtcttcaacccccaaaattatcaaagaaattgtttaaacgttgtacacataggatggttgagggaggagcttcttctactatatgacagcagctgaggatgtttcataaattccataaggagaacaaaggctcaagtctggatcccagcatccccctttgcacagaaacaaaatctcgatgtgattggatggttcaggaagaactcagttttcagggagagtctgtctcgatgcaagagaatcagtttcgtccctgatgaaacatagggcttctcttcctagcacaacaacagagagggaagaacaaaaatacactcgtgaaattcaggctgagactggcgttatcaatggcctggagcttgcaataactattaattaagtgcattttttcattattctttagcaaagaggtaagatttaatgatgtaagctaacaatggatgataatttaaagtggtgacaatagtttaattattcacacacacacaaaagttaactccataacttatttctttgtgagaacaagttcatttaaaatattttgaactgtgcatacaattatcacttaaactctttccttcatggctttgtagagacaaagagtcaattctccctgtaaatttctcactagacagttctacagatgaagaattctgcttaaaaaaaaaagaaaaagaaaagaaaaaaaatcgcaccattgggttttgcctagaatgtcctaggtctcaggaatgggatggatggttccatattactgtgtctttccattccaataagcaggaaccaaactcatgcaataacatgtgtatatgtgagcgtgtgtgtgtgtgtgtgtgtgtgtgcatgtttatgtggaaggtgcttctgttttttgtcagcccatcccagaaagctcgtttttccttttcgctgactattcagagttggagatgctatatgtggaaggggtgaggtgggaggattgccgcttcaggggtgattagaaaagaaaggaagaagaataaataaatactgtaagtggaagacatcctcttgagttcacagccttttcatggctttgagacaatataattgtaacatgactgagtattcaagcagctggacctcaccaaggatgttcaggagtgccagagctctagggccctgggaagagccagtgtcattgcagggagctagagttcctgattagggatggagtagaaccttcacgattatcctgtcatggaaaaatgcagaatttaaccatgtccagtgcccagtccattcctgatcctaacttcctctgtgcttccttgctgtgaaacacctccactgttaacagcagctccagggaccttacagaacccaatggagaggcatctgaggcaccatcaccagacccatgccttgaatggaagcaactcaaagtcccaatggacccaaagtcatgaagccatgattaggaccacacagtgcaagtattcagatggatattttataatatcaaatatataaatggatttgtcaagccaacaaatacttgaatattgttaagcatttgaataatccaatataacaacttcatttaggctgtcttttagatgactcatttctcagtgtaattatctcactggatggtttcatggatcaggaactctggttagaatcatactaatcctgccattggagttcagctgtttactacggttgggtgttgcataaagttgatgataccgtgtgacataagatactgatgtataaaggccagttttctaccatgattactgttcgtcaaaaagatgtttaggaaaaaatataacatggcactcaggattcctactaaaaaatgtacattctagactataagtcttctaaactctggtgaaacattctacaaaagagaaagactatgtgtaaaattaattccctctccttcatcttacttatagagaaaggagtggaaggacagtcatttaagctgagaataaaatggattgcagttttggcagaataagaaactctatgatcatcagatggtgatgtctgattggtgtttgataaatatcatccatagtttgttgaacagacatgttctcactatttaaaggtactccacataccacgtagttgctatcacttgacttcttgttttattttgtattatcataaattaaactttttgttgttgttaacttatttattgtcttccagagcaagagctttgtccttcttgtttgctatggtaatgcgggcctaaaacagtgcctggctcagagtgagtatctaataaatatttgttgagtaaatgactaaatatgtgcttaatatggttgttgactgttaggtaattttccctcccttagtctagtaagtgtgttgacataattcatttaataaagagattacaaaaatatcacctttggtggatagagttattggccccaattctcagccttagccctgtgtttagaactttgccttatgagtctgtggttcttcccattaaagggtggagcaaatttcttcactcttgtgtttgaccaggagactgactttggccaatagcaagagaggaaagtgatggtatcccagttctgaacttcagccttaagagaacttgcatgtttctgctcatttcttgtacttctgccatcaccatgaaaagaacatgcctgggcttacctgcagggcccagaaagagagcaccaaacactgacagcagagctacccagcagagccccacccgtaggtgccttgagccccagccagcccacagccacaggaatgacagaaatgtttattgttgtgtaccactgacatggtgtatttgcttgcagtgcaacaatagcaagtccacacataatctttctctgactcaacttcatgtcatccagtcccccagatggatgaccctgtacccaagacactgaattggcccaaatgaccaagatagatattatacccatgtccaagccaggacatctgtccttcattcctcagtggacagtagggaataaagaagagaaccacctgactaagtgttgtagaaaaaaaccaggttcctgtcacatgaccaggaaaaataagccatgcagacactttgaagggctggggataatggagtttattgggtgaaaaggaagaagactctcagcaaagcaagaggggttcatgttaacaggccccaatctcacagattgaatctcaggtcagctcccagaaacaggagagaccagactcctatcaccgcaaatggcttgaacttcccgaggttccatcccatcctcccagtgtgcaggtgggcatttttcagagagaatcaggaaagtgtgggcttcatttgagacctgaagtctggttttttagccttcaggctgttttaggcttgaaggcagggttttgtggggggacacttgctgcctcctgtctctatcataagggccaggacccttactcggcacttgccatgtgttgtctcattttgtcctcatggccgtggtgtcccaacttcacaggtaaagatgccaggtttgctgaggggacaccccttgcctctgttctcccacctgggaagagaagtcctgaaagcatctttcaacagtggttcttggagataattccaaagagaaggaccagccctgtctggaatcagagcaaatggatggaaaagcagagctagcgaaccaatcacctgcactgtctccatcagccccatcctcacagccgcctgaacattgaatctggcctcatctagacgtgatcccatgctctccctgggactatgttacttggacaaggaatatttgtcctggaatcctttgtaccctgctctcttacttgccttagataaccccttccgacagggagcagaatattacataagggatgctggaactgtgccttcaagatgacagcatttttgaaacaaaggcatagccataaatctaatttgtttctttgccaggctttccaaacacagcttcgttgtaggaaagtgaccatcccatcagaaaatggaataattgtgacttgcattttgaggacatatctttccgcagcctgggcgctagttcacgcattcatgtgataaatttctactgaaggcacactgtgagtcaggcaggcttctagggcctcggggcccagatcattctcttaaattagtgcccctttgttttggaagcattttagattagacgtcctttaccactgcttaccgtaggactttagatggctttcagacacacacccaagttctcgccttcgtctgcccctgataatttgacttctatcttgccttcctagcctctacctgtttccacctgaggtttccctgccctaaatgctcccctccatttccctctaacttgttttccaggacaccgatctaatggcctcagagagcaaggggccttccccaacttcctggaggagaacctttcacaagtcccttagtgacaccattgggaataataaatactttgtgacatttgatgcacaataagaatataccctgaataatgatctaatgatcacattgctttgcttttgttattgttgttaaccaatctggctcaactattggaatgtgtgcctctttcttcaggtcagggaccgtgttgtgaaaacctgagttcctgggacatattatggaagaagcacaataaaaacagatgggccaatgttaatttgcctattctgcttattgtttattgtatatgctctagaatgtatgctccaagaaggcaggactctgtctgttgtattcaatgatgtattatgagtacctggaatagtgtcaggcacgtaataggtattcaataaatattgttaactgaaagaacagttaggagcagacagagaaaatttttagcacttgtgtaacaataataattccagtctccaaataccttgtcttttcctaaaggcagtaggtcttcccgattccgatgcccacagttctttgttctccctataaacaaaacaagatattatcagtgggataagacatcccactggcaccagtttttgtcggtcgggagcaggagcagatatcagccacccagggcatctatttaaagtgaagaagctttgacttctggatcattatccacctgcagaagcacaaagatctttatgggagcaccatcttttttggtgatcacacctctggaaatgatgttataagaccaggaaattgatttcctgcattgcaaaatcattcccagggtcatcagtatcaaagccaagtggttcatggatttttttttcttaagataaagtgcaatatgctttgtgagttaagcttaacaagatgtgatgaaataaagtttatcctttgaataagtgtcatggcttaacacaggcagccgatcctggtcccttccttaatcatgacctacagaattgacttcctcctaagcaaaaagttacggcactgagaaggtagctgggtgcatggggatggggctggcaggccacttctgctgcccaatgtgaccaggcccaggagtccctcatgcagcagcgatgagactgaagggaaaataggcactttcttgcctgagagcagggtggtaaattgatacaaccattccagagagcaatgaggccctaggtacagaattgaacatatattgacattctaacctggcatttttttttgtgggaatttaacttaaagaaactctttggcaggtgggtgcacaggaaaaccagtccatgaaatgtgttctagtggtgcttgtaatacaagaaaatgatggcaagctatctactgtcactagaacagtagataaaacaagtcttgctatattcaaagagtaaaagactaagtagcagctaaaatgatgaactagagtaggaatcagcaaactgtggccagcaagccaaatcttgtctgtctcctgtgtttgttaataaagttgtattagaagatacccattcatttattcacatattgtctgtggccactttttgctctaaaaggttagagctcagtaggtataatagatactataagatccacatgtaacctaaatgcctggaagtagttacaatctagcccattacagaataactgtgctggttcttcttaaaagagagctgcatagatcaccaatacaaaaaaatgttgaaggaaaagggtagattataacataaaatgccatgatgctgtttatgtgaattaaacacaaacatatatggctatatacctaagtacaggaaagtggcacagatgggctggaaggtgtcaacctatttcatgattctaatcgcctatgggagggcccaaggagaatggactggggctgaagggaatcaaagtctatgcaaagataatgacttattccttctgctgcatagacttgaaataaatataacaacattatgctcccaagggaggtaggcagagtccgcaggatgcaggcctcgatgtttgaggcataggctgcttctaagaccgcttttcccagccctgcctcaccctgtggtcactctcgtggtacaatgaacaactttgtcaactgcacgtggcagacaactctgacctgagggctaaagttcaggcagaacaatgtattttagacaaataaataattgggattgaggacaaaactatagatatacatataatttggaatgccctaattgtactttcctactgctaacatcaccacttaaaaatgtgagatttatctaagtctgtgccctccaaaaccatagcttctagccacatgtggctactgaacactcgacatgtggctgggacgaaagaaaatgtactatcaatgtaaaacacacaccggatctcaaggacaatagagaaaaaaatatatgtatctcattaacaattcatcctatccatggcaggttaaaatgatcatgtttggtataccagtggattagtctactattgcagctgtaacaaattacttcaaagtaggtggcttgaaacaactccaatttgttatctcaccattttgtaggtgagaagttcaatgcaggctttactgggataagactgagatgtcatcaggactacattcttttctggaggctctagaatggtggtccccagcctttttggtactagggactggtttcgtggaagacaaggtttccacgagccagagttggggatggtttcaggatgattcaaaaatactatatttattgtgcactttattgctatgattgctacattgtaatcatataatgaaataattctacaactcaccataatgtagaatcagtgggagccctgaactcactttcttgcaactaggtggccccatatggggatgatggaagatggtgacagatcatcaggcattagattctcataagaagcatgcaactagatccctcacatgctcagttcacaataggggtggtgctcctatgagaatcgaatgttactgctgatctgacaggaggtagagctcaggcagtaatgcaagcaatggggagtggctgtaaatacagatgacacttcactccttctcccatggcaccactctcgctttctcttatgcctccctcttctacgtttgtttgtttgtttgttttgagacggactctggctttgtcacccatgctggtgtgcagtggcgtgatctcagctcactgcaacctccgcctcctgggttcaggcaattctcctgcctcaacctcctgagtagctgggattacaggcacccatcaccacacccagctaatttttgtatttcttgtggagatgggggtttcaccattttggccaggctggtcttgaactcctgacctccggtaatccacctgcctttgcttcacaaattgctgggattacaggcatgagccaccatgcccagccatccctcttctacttttaaggaccttcgtgattacagattatctagatcacatccctatcttaaaatcagctggctagcaaacttaattccatctgcaacctcaatgctcttttgccatgaaacaaagatttttgaacaccttcggggaggtctttattttggctatcacaattgagctaaataaaaatattttattaaaattaattttacctgtctctttccacctttttaatgtggctataagaaaatgtaaagttgtccatgaagctctcattctatttctattgggcatcactgcttcaagatgtgaatgtgcttcaccaactataaggtaccttgatggtgaggaatgttaattgaaagaaaatgactttttatgaagtgacttttattttttttctttttttttcagataggttctcattctgtcacccaggctggagtgcaacaatacaatcatggctcactgcagcttcaatctcctgggttcaagtgaacctcttacctcagccccccaagtaactgagactatagctgcatgccaccatgcccagctaatcttttatttttcatagagatggggtctcactatgttgcccaggctggtctcaaactcctgacctcaagcaatccttctgtctcagccttccaaagtgccagaattacaggtgtgagccaccacaccccagaatgttgctcttgaagatagcaaaaacacacttccccctggaggaataaataatactacgatagctcacatttagtgagggcttacaatgggccaggccttgtgtttaaatatcagttggtttcatctttatattaaccccgagacaggtactgttgttctttatgtattgcaagtaaagttgctgaggcacagataggttaagtaatttgccaaagtcacacagccaacaagtaggagcacaggctgtggactctggaggcctccctctaggtggtgtgcacgtgttagacatcagtttgcactgtaagatgcatgaagggtgctgttcttagacacaactggcaaaaacaacaacgctctgcggtctatctgcccctctgccaagaaactacaaaagacacctcttctttgtgcagctcttcagagtgacaaccctggtatctaactcccagccataaagcgaatttcccctggatactctgtcttgaggcagccctccaaatgggtatttgagtctggctcactttttaagctccacgtgtgactaattcccaccagacagacagcagcaggagtccagcagctgcagggaaaggcctcagcttctaaggtcttgaaggaaagggatagtttagccacacacatattcgcacacacacacaaacacacaggcacacatacatacacacagacacacatgcatacacacatatacacacgtatatacacatacacacacgtatacacacacacatacacaaaactacacacacatacacacatacacatacacattcacacacattcacacacacatgcatatacacacaatttaaatatctctatacttatctctacttaaaatatttgtgtatgtccaaatgaatatatatatatgctttaaatatctttttctgtatgctgatatatgtatgtctgtgtgcacatgtaaatttgtcatgcatttccttgtctttctcacttattttacccaactctttctctcttaaatgtctctacagctcaagatttccttacatagttccaaagttaaattttatttaacattcatttatatatctttgcgtgcgtgtgtatgtgtgtgtgtatctcacatggaataattcctgatcaccacacatatatgaatgcctctgtatgtgtataaacacataataaaagtacatccatatcaccaagaaaaacattttaaaaattattttggtgagcctagattctggatgcctgatagcggtatgatttcctacagtgtatttaaccaaaccccactccagtattaaggagcacacacaactagaattatattttactagcagacaactctgaactaaggactaaagttaaggcagaacaacatattttagacaaataaataattgagattttaaacagaagtacatgcatagatataatttggaatgccctaattgcattttcctatgctaacatcaccagttttggagatatgggattcacagttttagggatatgagtcccacagtttctcctctttagaattcgctctttacttgacctcccttaggcacacacaacatttcctccataagagatgttctctgagtcgcatctgcatttcctaatatctggaaacccctctgggtcacccttcccctcagtaactttgggccacctcctgggccctgatgtgcaggatccaatcaggcagacgtgcagtttgcatttttagaaccggcctattctgttcctttgccatgctgtggcaagccctttctgtaaagggccagatagtaaatatttttggctctgcaggccacacggtctctgttacaactcaactctgccattgtagggcatgaatcgtgggctatatgtaaatgaagaggcatggctctgttccagtgacgctatttcaaaaacaggcgatgggcctggatgtggcccactggccatattcctgacccccgccatccaccaacatgggtcgttatctcctgatatctgtaggtcactttcacatatgtctagctgaggtacccggtgagtattttagagcccagggaactcatcagtggctgtgctcatgcataattaggtggtgaagccaatgtggtgatttgaagcttcgttatttgctcccctgattttattctccaaggatctgtgagttccttgcgtgtcctattgatcactttttccccagcaccccagcacagtgcctggcccacagtaggtactcagtactgatgaaatacttaaaaaaaatctgattataatctaattataatcaggtagaatttaaagtataatattcattcaatactttttcagaaagtggtaacatcactcttgaatggataatggaaatgttgctattatcgggctgtcagatgaaacaataatttatgtgagtcttgcaaatagaggagggggaaattatttcctggcccgcccaaatttgtttcagacacttgaatggatgaatgagtaaatggatgacggcttttttccgactttcttggattttcctggggcatggagagctggagtcttgcctctctttccttttccacctcacagcacacgtcattttttgatcatgaaatttctttaccaccaagatcaggcaaagcctcagaatccttgtcaactcagctccctatgcaggtactcacaatcagtccaagttaacaagtgctgtgaaatgtctttgttatccctaaaccaaatgttttcttgagcatctactatgtgctcagcatacatgaggttaggcaagattaacccaaagtagggaggtaacaaggaaccatggcacagccaggggtgtcaacataagtgcatgggcactcagagagaccccgagacctggaaagcgtgggaagtaatggaataattccagttcttagaggacccactttgtctcaggtcctgtgctacagcttttatgtgccccactgaatcacacagcagccaataagctaggtctctctcattatctagagaaggaaactgatgttcttaacattcctaggagctgcaattgacacccaagccttgggacatgaagctgtgaaaccaggggagatgaactcaggtgtgttcttaaggatgccaagaggaggtaaactagtgggccttacagaaaggataagctttgttggaaaagaatgtaatctttggcctatttcatcagtctgaaatatgggtgcacatgtttaaatgggtagatgggtgggagggtagatggatggatggatggggccagataagctaaagcatagggtttgaggttgagttggtaacactaagtctggaaagatgaaatctgattataaagggccttgaatgccaatttttagaactcagatttattctgtagtggagaatagagaggcatgacagtttcagtggggagtacaattattggtaagatgctttaaaagatgactatggtggctgggcacagtggctcaggcctgtaatcccagcactttgggaggccgaggtgggcggatcacttgaggtcaggagtttgagatcagcctggccaacacggtgaaacccacctctactaaaaacacaaaaactatccaggcctggtcgcgcttgcctgtaatccaagacacttgggaggctgaggcatgaaactcacttgaacctgggacgcagaggtttcagtgagctgagatggtaccactgcactccaatctgggtgacagaatggaactgtgtctcgaaacaaacaaagaacaagaaagatgactatggccccagtgaggaacatggattaaaaggacaggctggggcacacagctcagagaggtgattgggcaccaataatcccatcaagaagagctgcaagtatatactgggggcttaccctgcaccaggcaccctcctaagtgcttcatgggcattttctcactcaatttgtgcaagatcctaagaagtaagtgcgtgtttatcatccccatgttacactgaggaagctgaggtgcagagaagctaagtaatgtccccaagttggtgcttacagtgagcaggtggtcgagctgggagtctcacgtgagcggctggctccagagtccagacccttgaccccgacacctttttggtggtcagggacagccagaggtctagaggacagtaaaggggataggcattggagcaacaggaaagagaacgagaccagccaggtggctgttttagagcttctcaggccatcgacccagaacatcgcactattgcccatggaagctgaatgccccgctgttcctgcactgcgaattctggggacgcgctgttgacctggacccctgagagaaacccaacaagagcccctggaaggatagaaatctcaggtatgcaggattgcatacttattcattaataaccaaagaaagaaacactaatatttctttataaacgtgaaatgttagacactgttctaaatatttccctggcagccacctacagcctagcacagtgcttggcacagagcacacactccatacacatttgttgaataaatgaatgaatggtgagtgaatgaaggagcactgtgctaggagccagagcctcgggtcccagtctgagcttctccatcctcctgtttgatagagcttacacaagtcacaccgacctctctggacctcagttttggcagaatgatgggcgagtgagccagggaattcaaagattttaaggacgctgcgtgcatgaaggctcctgttccagcagctctccccggggtgaggtgcagctcccaccaagctctcctcctttcccccctttgtggctgctgcggtggttttccctctctgcaacaggacatcaaatggttaatacaccacccatcgtctttgatttatgaagtggccgattggaccaggaaacacaacacagacagccttctcacttgcaggggagaccccagagagcagtaattctgtgcataaaagcgagcggcagcctcgggcctcagtggtggtggaaagcccaccctgccgagcccgtcccggggatgatgccagggccggcgtttgttcctgctctgtgcagggacagaggcggctttgtcacctggcccctgtcgtccacccagccccggaatctccgctgcccagcctttgccctgagaactgaagtgcagccctgccccggtcaccgcttagcggttcctttcagcgtctgccaatctatcaagattcagctaccgctgtgaacccatcaactccatggaaaggaaaaaaggaaccctcaccacagcaattatttatcctggcctgaacttcaggtgacctttcccaggtccacagaagttgcagatgggagcaccttggtgtgtaggattttttccccactgtgtccttttaaaaaacacattttttttcatgacatgaacctcttttgcaaaattttcttttgcaaaaagatctttgggtggtctataagaccacaacaggggtggaacattggcctacctagagcacagattggatgtaaacgaagtcatccaaagataaaataaacgaagaaacaaaaactgtgacctcatggggatggtttcagagaagacccgagtgcagctcacccacaggccagctcagccctcggacaaaaataaggggctgttctgcaccaaaggctctgccctgacccggggagatccaatattgtaaactctgtgggtgggtatttgtgtgtgtccccgaatcagagaaaaatccaggccataacaaggactatgcagggtgtaactccccgtgtaaatttaaagtgacctaagggacataattacataaatctcatcatgagacaatatactttttatttgtttgaattttatttgtattggtaaaactgacctgaaactgacacaagtttattagaaaaaggactctgtaaaagcaagtgggctggtcttcttatttaagatggatgtgccgacttctagtatgattagagaaatggataactcactaacatctgtgcaaactacaataaaaagggatttagtgttaccccaaggaaggcaagagaggctgtctgtccattaaacgctttattacagcgccagcagcttttttctaattcagttattcctgcacagcgttcagcactctgactgcctgtcaacccaccagacagtgctcggggctgggaggttttgtgcaaggtaggtgacaatcaaatgagccactgagaagagaggggagcctgaccctcgtgaaggattaactacagaaagtgagtgtgatcatgtcacaccattacttagaattttcacagtcaatttctgaaaatatgagataagttcttaaagaggcagttgtctcaggagctaagcagacccagtgtggttttgttccatgtgacagggcagggagcctggagaaagagtagggacttcgagggagagggaacaggtggcatcagcactgtgcctatcctctgtagggcattctagagccaggccttggagcaactggctcccaggaaggctgcagccaagaagggagaggatggagagatgccttctgggaccaagatgccatatatccctcctccactggatgctggaatccagcctctcctggggtcaactgggctaatgaacatgaccctttggtgatcatattaggctttgggttcacaggaagcctgtctagggcagtcaagatgccggtgctgggatgaaatgtccatcttctatcactccttttcacccctgcaactgctacaaccaatatcatcataagcttccccaaaagactatatgcccctacggcatgcaaaaagatccagtcccacaggagctcacaagccacatgcttaagaaaagtactatatgctcaacacaaatatacttgagatatatattttcaaagcctggcaaaggtagatgacagtacaaggaagcatggcacattttggggccagagatgagtctgtccctcatttatagatggcagatctttaacacaaaaaggggaaggctccacccagagcacacgcaatctttgggaagtggagctgagaccggagccccatgttcctgatctcctgaccaacagaagttatgctacagggcttcacgcagtagggctttttgagaagatggactggaaatgtgatttcttcctttgcatctatatatttaaatgagaaaagtaaaccacaaacctctaagcttggttctgctaaagtaatttaacatctgctgccacctgaatgtaattgaaacaattcattatcaaatttactgatctgcttaatgattttgtatttctctttcaaaatcaccttcctcctaagctagcctaggtaaattaccctttgcttcaaatctgagagattgaagggacctgggagaacatccaattcaagccccctcactttaaaaatggtgtaacagtgttttgtgtgtccatggtgaggttgcagacctttatcgaggtcacagagcaagtccagcaagagttgaacacaggctgccagaattccacccttgtctcattccgagattgtgtgctgagggttttcaactgcatctctaaagggaaggccaaagaaagagcaacaggaaaggatggtaaaaagggggtagaaaggaagaaggaagggaagaaaaaagggaaaacagcaagctctctttccagagccacacatttttttctgtttgctcagtggcagtctgttaaagaaatacttcattgtcactgaacacagagtcattaaaggcaccttggaaatttggacccttttactagaatcagggcttaaatagcaacttaatttatgacacttctcgaggctgatggcgtttttgctctaaggtaaggtcatctcagtatatacccctcccgtcgcttccctttagaacacgcagaggcgtttcctctttactttcaagttactgattattcaactgctcaaatgtaagtcacatatgtatgtaggcacgtttgagtccacggtgtgtttctaaaagagagctcttttatatctgcctgtaaaagaggagagctcaaagatgggggaacccacaaataagcaagtgaataattagatcagagatagatgccaccttttctcagtgttaaaactgtgaggggaaaaagtactcgtgcataattgacataattgatctagtatttttttttcctttttgctgcagtaatttttatgcatgccattgttgctgttattatccaagatgtgatcttgcgtggttgataatacaggctagatatgaatacgcgtacgcaccagccaatcacaaatctatagtgtctatttctgcatcaccaggtgctatctcatgggaaatatcctcttttttggcaggcacacagagcactgcattatctgtcattttcattagattcaagctacagctgggccaaaaagacttagttctagcatatgtgctcaaaatggccaagctgcgattgtccaaattcaccctttcaagattgcattactgaacaactggagccaaagctagaaattggagagagcaaagcgcctgaattccacttggaaaatggcaaacaccataggctctgaagattgaagcgtattatcatgactaactcaaagggtcagaggagacactggcttccaccagcaagctcaacgtcttttggcacatctgaggtggggatggaagctgcaagagcctagattttgacaccacttaacaaagaaaagccaatgtctttcattcccctctgtgcctttcagtataccttggccatgtggaatgcaataggttctgtacccaggtcttgacctgggccagctggtcttgagccccgtaggacgtagtctgtggcctgctgcatacttggatagtgtggggtgtataaaaagcaactcatcctgagggagaaaagcatccaactgtcataagcttgagtctccatgcaagtctccactattttataaattcagttctttatgtgaacatgcgaagaagacatattgaaaaattagccccacaaagaaataaatacaaaaatccccactccaggttgctggaaatgggagaaccacagggctggggaagatggtcactccacccagtggacttcatgttatttgaagcagacattgaaaaaaaaaagagagagagagagagagactagttgttcaagcagagaaaaagaaagtaaaaaggccagtgggaatgtaaaatagtgcagccactgtggaaacagtacaggggttcctcaaaatattaaacatagaataaccatatgacccagcaactccgctattgggtctataccctgaagaattgaagagatacttgtacacccatgttcatagcagcattattcacaataaccaaagtggaagcaactcaagtgttcattggtagatgaataaatgaataaataggcaaaatgccatagagacaaagtagaacagcactcccaagggctgagaagaagggggaatggagaattactgtttaattcagggttactggtacagggttccagctggggaagatgaaaggattctggagatggatggcagtaatgattatacaacaatatgaatgcacttaataccactgagttgtacacttaaaaatggttaaaatggcaaatttcttattatgtgtgttctaccacaatgaaaaaaaaggaggtttgtgtctggtcctggagacacagactccctgagtctgtgccgcagcaacaccgagcaatgctgtgatcttccagaatgccagtaagggtgagcccttggccatgtgtcctttgagcgatgtgcaaagttccaaagacagaaggaatatctgggatttggttatgaggatatatgctgccctagaattgtcccaggttttcatgccagggtggagacctcacacaccatggtggcaggggatttctgcagggagaagtctgctgacaaacccatcttatgggttctggcatcttggccacagacagcagtcagctgtttttcatctgcactgctaatagggtctagctgaatggctaacaagcaaggtgaaatgtagcatgaatgttttgaaagccatggagcctcactttgggttcaggagtagcaaaactagcaagaaggtcactgttgctgattggggacaaatgtgatgagtgttgggggcttaaacaacagggatgtattttctcacagttcaggaggctgcaagttggagatcagggtgacagcatgatcaggttcgggtgagggctctcttcctgacttgcagacaagcacctccctggtgagtcctcacatagggattgatgggggaaacagagctctggtagtctcttcctctccttataagggcactaatctcatcatcagggccctaccctcattaccttatctaaacctaatcgcctcacaaaggtcccattctccaaattccatcatgttgaggtgtagggcctcaacatatgatttgggggtttggggggacctacattcagcccataacaaatgtgactcttaccttcaccaaaccattcttcctgcagctaaagagagcatcccacatctacatgctcttgggtcctgtggtccatctgttctcattagctgtaattctttgggttccatatttctctcatacccttccaagtccagctagactgcaagcatcagtttatgaataggaaattaaaagtaacctacaaaacacctgattttgaaaagatgtttccccacaggggccctgttgtctattaattgtagtgctttaaaacaaagtaaatatttttttgttgttaaaagaaatttcttcttgcattttctttccattatcaccccattaatggagacgaggtaaggcaatctgaaaacatttgagtcagagaatatacaaacaaactttcaaactgtctttcagcaagtgaggctaaagttattgaatatgcaaattggcttattaaaagaagaatgatgtctttttcagcaatcagtttaattacagtggaacccttcaatggagaaatcaacttgtttcttagagtagaaattctttagaaagggaatttaggtataacagatcaaaattagaaaatttacacttggtgggaaaaatggtctcagtaaagaaaaatgtacacttggtagaaaaaatgaggtggtgggggaagaggaagagagatgccagtaccccgcttggtagccttgcctgggtctctgagccccaggctatttgtttgccattgtcctgctctacagcttgaaggcggtgttaccaaaatgccaggggtttggtctagatcacgtcgctccctgcacagaaagacaatcactgagacaatgagtattgccagggaagaagactttattcagatgatgcagcccaggagatgggagatgagtcccaaatccatcttcccaactgattcaaattaggggtttatatagcagggaagaaatgtaactatgtgtgggaaaactgaaattagggagcagtctggaatctcagagtttggatgtggtgatactatctagaagccagagaatcagtttcctgagaaaaggactcagctcatacaaagataaatttcaagctttaagacagggagggtgaatttctatgtttattcaaaaaagaaaaaaaaaaacccataaacctcagttctatgggacaattaggcctgtttcaaaagaaaagatataatggcctataaaaggtatttatgcccaataactaaggcctcatactccctgtggggtaggagtggatttttttagggttgggcccatgtgcaccaggaccagaattaatgtgatgtcagtattgagaaggccttccatcagagccctgtccattctgccccaggcctttccctttcccctcagaggccagagttccctgcccagtgtcccatttctccaaaatcttctccccgctcaggtattagagatctgagtaaccatgcaagcctctcctcagtgaagacccatttgttcattccaggccttataggtctgttttaatggagggtcccgtggttggggggatactggtccttcaagagacaccaaaacaaccatgacaactgagaaagatctctggagagacctggtctggaggtacacttcacccatgtcccaccctcagctacctccatatcatagtgcccttggaagggcggccgaccaagatttagggcagaggtttgaagtcacactttttgggttgactctctgctactgacagcatcaacttagtgacaaccagcaagttgtagatcctctctatgcctcaatgtgctcatctgtaaaatgggggcgataacactgtctgtctaataggatgggtttgaaatgtacagagaaaatcaggcaaaaatttggtataatatttgtcccactgcaaacattccttcaatagtcatggtggtggcagcagtacaaatctcccatgtacactgctttgttaccttagctttcacacaagtctgaaatgcaaaacatgcaattcacacatactcaagaaatgcacaggcaagtgttccttcagtaaacttcaaattcttcagcagagaacacacgccaacagtgaacaaaactgggaaaacaatccctatactttaacgttctagtggaaagacaaacaataaataaaaagcatcatgaacataaagatcatattttatttcagaagtatctgcagggaacagaagaatagaacaaagtaaagtggtcagaagacctgaagcaagctaagcagttggcagcggcaatgtaaataggatgaacaagatcaggctcattgaggagaggttgagcaaggattttaaaatggagggagccatggaaatctagaagaagagaatcttagggagagaggcaaaggccctggggcagaagtgggcctgacctgttcctggcacagcagtaggtcagtgggaatacaaggagggagtggcaggagttgggaaaaaacacccaagatagggacagaaggtgatggggctagatcatgtagggtctcagagccaccataagggctctagctcatgcttagatgaaatggcagtcctttgtagggctcttgagctgagaagtagtattaattatctgactcttatttgaaaaggaagatccaatgaccatgtggtgggtcacttgggatggggcacacatagcctggaggtgagggaccaagctggtagcagcagttgtggatgcgagaatattctaaatgtggaaatattctaaaggcaatccaacaggcttacctcacagattagatgtggggtctgagagatacagaggagacaagatgacttccagattgcatttaattaatgcaaagtagtttgtaaacaaggaatccctgactaccttgtttgttgtgaaaaacaataaatctacatttactctcaattgctaagtgcttacctatagtgtttaactcagtacaaaagactatactgcacatttaaaaatgaggtcacattaagaatatgtcatctatgcctcaggtgaggaatatgctcagatgaggacattctgggcatcaggtggtaaatggaaagcactcataagtattttacttctgtctgtttcttgaaaaaatatgttcccatcccagggcatttgcacatgctatggtttgcacctaaaatgttcttttctaagagctttgaacatctggctgtttctcctcatcagctcaattatttcctccaacctggccactctctcccaccggatcctgttgtattagtcaaggttttccagagaaactgaaccaacaggatacatagatgtaaacagatttattatacagaatcagctccctgtaatcccagcattttgggaggctgaagcgggcagatcatttgaggttaggagctcgagaccagctttgccaacatggtgaaaccccgtctctactaaaaagtcaaaaatgagctgggcgtggtggtgttcctgtaatcccagctactcgggaggctgaggcaggagaatcacttgaacccaggaggtggagactgcaatgagctgagatcatgtcactgcactccagcctgggagacagagcgagactccgtctcaaaaataaaaacaaacaaacaaaaaaaaaaattggctcatgtgactatggtggcttagaagtccccagacatgcagtcagcaaaggggaagacccgggagagcccatggggtagctccagtttgaacccagaggcctgaggaccaggagagctaagtgtacattccagtctgaaagccagaaggctcgagacccaagaagagcagatgtttgagctcaagtccaaagacaggaaaagaccagtgtcccacctccatcagtccatcagaaggagctacctgttcctcctaggaggtcagtctttttgttgtattcaggtcttcagttactggatgaccaccccacctcacattgtggagggccacctgctttgcttagcctaataatttaaatgttaatctaatccagaaacactctcacagaaacacccagaataacaataatctgggcatcctgtggcccagatcacctaaaatgaaccatcacacctggtgtgtcccctttgtattggtattttgtgactttatcttagttatttatctggttatctatttatgggtttgtcttctctgtgagagtatcacatccaccagctgtttcttgaattaatgaaatactgaataaatgaaaactttctgtgtgtgatttgagatctaggagagagaggcatggaattttgctgaggcaaggtgacattggtatggaggggagagggtacttgatgagaaccagaaggagccagggggctgaacaggagtgggaccaggagagagattgggaagaaagtagactggatgggatcaaaccttatgggaataaacaaaaatccatctctgacagccaaatcccccctgcatgcattctggcttttatttttaatctggagcaaaacatcccctggcctgactcctctgacttgggtcccacacagcaaatcaaagcccaaacagggcgggtcccaggctgggctttcctggaaaagtgaggagtggaaatgagccttgtggtctcaccccagccctggaaggccatttgtctgtaggataaaggggtcaggcaatggcccagttcatcatgactggcaaggctgccccaagaggcccagagctggatagacacaggtcagtttcctgcacagccagccagccctcggccgggaattcttacattgcgctttcctgttggcacatacggctttgtgttttgttgatcaattttaatgaaaaaaaataaaatgaaataaaggagaagctgtcttcaagtgttaaatgttatgtgcataaatcttgctaaaactgtgaagagaaatacccctatataggacttaagctaaaatcatctctcccaagttgtcatgtttttaatttgtttgtgttttttttacaaattttagatagaataattggttttagaagcattgctctgataaaccttcctctagggactctgtggagaggttctggtagagttgagccatgtgttcagggttagattgggtctcagaggctggcacaagggtgacatgaaggacaaggttcctccttggcagggtcttcaggaaagggagcacatcctagtggggagaaggaggctctggctcaggcccttggtgggtacaaaggggcaggagtgcccaaggcacagggcctcagatggaacagctgtgtgtctgctctctgttgctctgagtggaggcggccagtggggccctggccaggagcaggcagggagtggtgagcattcttcccccatcttcctgtccctgagcactgcaggcctggctggcatcagcctttacttagccccgcatctctgcccagtacttgggaaggttctggtctgggaatcaagaagatggagacacagccctacccttaggagcctatgattattacttctctgtaaaatgagagaaggctcactcagagacaaggaagggaacccatgaggggctgcaacttgggtctgaggggaaagttctgtgtgggctgaaggaggaggaagccctctggggttgggggcaccttgagtcagttttcacagtggtaaaaagagagggatctctaggtaggtggtgcagactgaggcaaggccaggtggtgagaataatccagcccaggggacatccaggagagaggcttggctggacccaccagcagaagtcctgtagatccatccggaccaaaggaggtgagaggctgtgtaggggaggaggggtgggcacatgtttcagagttgacaatcaagtttctaactatcacagatgattttggaatatatagttggaagagaactcagatgagtcagtgagaagtgatctgaaagaaaaatggagaaagatatgaagagatactttacagaagtgaatatccaaacaacccatgaacctatgaaaatctgttcaatctcactaatcatcagagaagtgcaaattaaaaccacaatgagtccaagcatggtgtttcgcttgtaatctcagcactttgggaggccaagtggggaggatcttttgaagccagaagtttgagactgggcaacatagcaagactccctctctacaaaaataaaaataaattatccaggcatggtgacacacacctatagtcccagctcctagggaggctgaggtgggaggattgcttgagctaaggaggttgagcctgccatgagctgtgattgcaccagtgcactttagcctgggtgacagagactctgtctcttaaaaaaaggaaatactgaaaaacaacaacaacaacaacaaaaaacacaacgagataccaccacacaaactggcaaaattggaaggacagaaagtaccaagagctgacaagaacctggagcaaacagggctctcatgccctgctggtggaaatggaaactggtagaatcacttgggaaaactggcagtatctaccatgtgtaccctccatcctggcaatgccactcgtaagaatgtacctggcagaagtatgtgcatatggggcaatgatagcacctggcccttgggttgctgtgagcaaaaagagaatattcctgccctatcccagcagacttttcccagcagcatagtatagaattgctataaactgggacctatccaagaatccatcagcagaaggatgcatcaatggaccatggcgccttcatacagtgggttactgtaggcatgctgtatttcaaattaaacatttctgaaaatgacttggatttgggaggagtgagatgtgctaagctctcctgtgcccccagaagctgcaggagagacatgatataagagaatggccagccgggtggtgtcagcatggttgccctccctcaaggggccccacgggaatctccatgtaatctccatcccttgccttcccagcctcggggctgctggccgtctgcaatgttccttggcttccagccacatccctccactctctgttccatcttcacatacccttctcctctgcatgcctttgggtctcctctctagctgcctgtctcttacaaggacacatgtgcttgcatttagggtaagcttggaaattccacgatgagctcctgctttcagcatccctcacttaaatcccagtgtttgctgtaaaatgtaacagtcataagttctgcgcgctgggaagcaaatagatctttgggggttgctttttttccccatttgtctgctgaccacatctagaatataataacttgacatctcagggcaggaatattctcttttgaagctcacagcaacccaaggacaaggtgctatcattgccccattttatagcactgcgcagagaggggaggcggggacagagcagtgacatgaacctgatgttcacaatgagaataagacaaatgtttagaggctcctgtagtccactttctggcttcccctcatctacttttgtaatcaaacaccacggactgggcattggtggctgcaagtgtagacaatggaggctaacaggcctgggcttagagctgcctcaatttcctcatcatgtcaatctcacagcagggacagcctgagcatgaaaggaaacaacatatgaagatacttagctcagggttagcaaatagtaagcttcccattgatgatagatatgatcgttctttttgtttaattgaacaaatgtttcccagtccctccagcatgctaagccctgggtggtagtcacagtttgcagagagagctgtcagcatctcctggctactgggactagctggagtgataatagtattcagggcaaatgtcagttgttcctcattcgcacccctccttcattcctgcttgccacaaggatctatccttaacagtccatgttaaatgttggcataaagaaggtgctatcggttgggcatggtggttcatgcctgtaagggaggccaagtcaggtggatcgcctgaggtcaggagttcaagaccagcttggccaacacgttgaaactccatctctactaaaaatacaaaagtagccgggcgtggtggcacatgcctctaatcccagctacttaggaggctgaggcaggagaatcacttgaaaccgggaggcggaggttgtagtgagccaagatcgcgccattgcactccagcctgggcgacaagaacaaaactccttctcaagaaaaaaagaagatgctagcatccttgcctctctctttgcaggaattcacagggcaaaaggtacagaaggaaactgtgctccagggtgagacatgtcatcagaaggctgtcatctggaccttggaggaaggacaggtgagtgatgcctcctgtagaagataatgcctgagctgagtcctggaggatgcaaacaccacgtgcttcagcttcaggtgtcaatatctgaaagttggctgaagaaatgtgcacctgtgcctctggggaagatggtggtggaaatcaggaaatatagtagttgaagacagagcaggagacctggactgcagaaggcactgatgatgatgatgatgatgatgatgatgatgatgagcatgatggttgaatggtcaggatcctagtgggaaacccaggacacacccaaggttgactgaagagcttcctgacaggactactcacaacaatggggaaagggactaacagaaaacagcaagggaagataaaacactccagggctatcagcagcagcaacctccatcaccttgtgacctgaagggccagggaaggagcagtaaccagaacccagagagagctgtccagtggaagaggtcatctgataacctttgccaggagaatacagccactgtccatggtggcccagaagagagaaagacaggggaacaaatactctgactgtcctctgatatccatctcttgtagtgctcccaattagccattcccaactagaagtcaaagagtaagagagcctatggatgaagtccacattggtcagcttcctggagtacagagcagggtggaggaagatagaaagtagatttggaggggggcaaacagagaatctatccccgtgatgaagacaatgatgatggtgctggtaacagtgataattgtggtggtggtgatggtgctggtaagaatgatgatggtggtagtggtgacagtggtgtttgtgatggtggcaatgatgatggtggtggtaagagtgataattgtggtggtggtgatggtggtggtaacaatgatgatggtaggtggtggtggtggtggtgatggtggtggtgatggtgggggtgatgataatggtggtgatggtggtggtaacaatgatgatggtggtggtgatgatggaggtggtggtggtggtggtggtagtaaagatggtggtgatgatgactaccatttattgagctcatatagtgccactcagcgttctaagggctctcaaccttcacacgagcccagtaagatagggaggtagagattctcagagatttgggagatctacatacagcctaactgtcagagctggcctctgctcccttggacctccctgaaaacacaggaattggtaaagcccctggtcctggcaatttgtattataattacatttgagtttgtttgtgttccttacccctctgtgagctcctctaggtaagtttagtatctgattattactgtagactagggcttggcagtgtctagcagggtatctgctactcaggaattgctaagccaatgatgattagtgagtgaatgaatgaatgaatgaacgaatgaatgaatgaatgaagagtctgtgacttccagtcctagatagcaaggtacgggctgtacacctgctttctacagagcctggcccaccataggcacttagcaaatgttggagataatccaacacagtggcaccgtgacatttctgttttctctggtgcacgtttcctcacatctaaacatggactgaaagacatccaagcttttcaaagctatgtggtttcctgaaatttccacaagcccaaactctgagctaaaagtgaggatgtttgtcctgtgtctcaatgctgcacatggaaactcacagcccaacatagctcagaattgctaatcaccttgggattgttgtgttaataagtgaaaatacagaaacacaaacctgtcttcctgttaatgttaattttggtcccaaaaaatgttgctaaaacatattgacgggcatgtcacagatgttccttctttcatacatgcgagatgctgaatgtgagagctggacgctttgacaggatttctgttgcttttatgataaccgccatcaggccatcttcctaccactggggcccggccctttatctggccattctcctgtgcagaggctcacgctggggcaggcatgtaattctgtatctactaccacaacctgcacaatagactgataaaggtaagcagcttgaaaaaagatgagcgatgtcaccatcttgtcaactcacctgctaatttcagtatatgcagaacatctgtaacagcctgcttggtggaggactaagttgaatctcaggttgttcattcccagagctcattagggggagagatgacacaatggcagggcaggtggctctccagtttgacaccaaggtttttaactcatctgggtagcagagatttagatccacttaccagtttttgaagaatcaagcagaacagcaccaacttccctcatcttgcagtggccatgtttaagcataagaaggtgtctcatgatttagcgtgattaccaaagaggaaacccatccagaatcttctggcttcatggccttttccttaccatgcaggaagcagattggcagggacctcagcaaaggggcagggtaggttctggtaatattttaggcctggtaatattaccaggggtcatgttatctgttttggaagatgtaccatctgagcagagagaagaagggttttctccatgtctaaggggtttcttttagaatccctctgcagtagcagtgctctgtggctgggtcagaggagagagagaaccaccgtagtggcttggggagggagaacggagacagtggggcattaaggagctagacttatgccagctaccaggaagaggctctatgctaagcagaaagcatgggcatccccctccagacccacaccagcagaatttgtgttttgttggtgtgcccacaggctgacagaagaaatgcaacaaggaagaaaaatgcaatgaggaagtgaaggtacagtcccaggccaggggacttggaaagtggccttctgcttttttttgttgttgctggacattttttctttttgcaatattttcagccaatttcatcaaatgaaaaattgccacctcgttgtggatgctttattctggctaattagcactgatgaggaatcctgggtcaagctaaggacacagctacatgcaggactccaaagagaagccagaaggaactggagtcctggccagatcctctagagtccgtgctcctgcaggcatctccactgcaggtgaatgcagtgtctgtcatccccactgcaaaccatgattgttcccatatggattgaggcatcctgagagccgcatgctctacatagagataaagtaatttttactattcctccaatgtggaataggaacttggagagtgagctccatcagtctctgcccagatttggagaaagaacccagatagaaccaccttttccagaggcattgagagcaggttcaagctggggaaacatcttcccaaataaacatttctgtaccgatgctgtgaatccagcaaaaacgaagagtgcatggaattgttggccagatgcaatctcagagagctcttgttccagggagaaatgaatccctcagacaataatcctcagctcctcctagctgcgcccagctgaagtctgcctaggggatagtggaaggcactgtttcactccacagttttggaaatgtgcatgcaacatttctaggtcacaccaaaatgcacagcccgtgatgaaaaatccaaatcctaggcaggtctgaggaccgaccctaaactcccaacccaacccaagaacctcattccaagtgcttctaaggaaagcagagagtcaaatagaatccctcaaaggaaaggagaagctagctggtgtttcttgcaatgtcagacacgcctcaactttccctttagaatggctttcctttgcagatagaagtgtattgctttaacccatacaacacgtgtccaatgtgttaaaagaagataagtttcttagacaaaaaaatacatatgtaagactctaattcacagaggacaagtaaagtgagactcatgggccctaaaataggtattgtgatgtttaattttatgtgctaatttgacaaggccacagtacacaggtaactggtcacacacatctggatattgctgtgaaggtattttttagatgagactaacatttaaatcattagatttagagtcaaacaggtaaatctccataatgtgggtgggcctcatctaatcagttgaaggccttaagaaaaagagagattttgcccaaggaaaggggaattctgctagtagattgcctttggatctgaactacaacatcaacccttccctgagtctccagcctaccagcctgccctgcagatttaggacctgacagcctctacaatcatgtgagccaattctatgagattctctctctctctctctctctctctctctctctctctctctctctctctttctctctctctctccatccttagaggacaaaaagaaattagcctttgccagtgtaggtgctgtcataatgacactgattcaacacatgccttttccctgcaaagcctgaaggcagggtgcctcgacacccggcttaggtcttctcattttcatgaaagatatgttgcatgaaaaatggcattctgaggctcgtcttgctctgagtgaagactactctgagaatcagaaaacgaaacactagccagacatggcaaaaaacaaacaaacaaaaaatcttaattgctcgaattgccactgaaaccaaccttccagagaattgcctgactctaaaattggaaggccacagaaaggcagcaagcaggttgggaaccaggtgtgttagggggttttctttcctgcatttcattgttttaaaggcgtcttgatccatgggttgcaatatggctcaacctgtaaggagggagaggtgagaggtcagccaccctctgctgtagggagctgatgtttccacctcttacatttcgatgagcaagacattttgcttcttcatcccccaaaaggaagaggtgaacaggcgctggagtgttttgactgaagagtctttggtgttccctttctaataaagggccatatattagtgccgaacagtcatttttttgagcactaaagtaataccagtactctcattgctcaagaaattgctgagcaaaatcttccaacaatgtgtctccccggcattccttaaccctattgataatgataaagtctcataaatctaggtaaatctttaattacgccttcagaacgtgacgatattatgaccgtgatatagtcataaagggcacattcaaaattagctcggtatacattttatgaatatgtaaaagggtagaggtggtgagagttcaaaagcaaagaccaaaaaaggatgtattttttcttttttgttgcaatcatctgttaagacgggatcttattttcttttttaagataattgtaggaaaaagctctctttcttgtcttgtatagtttttattaaaatccaaagcaccaactttgtgaagagccctatttcatgttacaaaaactgcgagattaaatagagggagtattttcttctgtgttgaaacaccttttggcctaaaaattgttcgtccttgtattaaatgtgtgtgaaacatttatggagagaggcatttctttgcactgttttactgaggccgtaacaaagcttagagtttgtttcatactctacaatcagggtgattacagcctcatctgtctcccacccctgcatttggttagtagccctatgcaatttatttttatcttcagccaatgcatatatttttacttgtgtgaataataggggaaagattaagttcttttattttgctaattaaactgcatttttctaaatctcatgaggtagtaagtgacagaattaacaggagcactttgcagagttttgctattttcctgattagattagaggtatttgatattgaagtcagagctgatgaagtggtttcctcgatgtgaatgaatgcatgaccctagtttatcaccgcggcttcataaagaagtcttccttactgtcaagaaagcccaaccaagagtgaaaatgacattagcaaaaagctaagcaaaaggtcagcagagcagaatgagaagggagaaggaaaaaatgcattcctctgcctctttatttttccccccaaggggttaaggaagattgctcagttacaacctctgtgctgagcagagcagggtgagcctcagaactgtaccctcctgagacagggacacctttctcagcctctagagtttgaaggtaaaaattttatgttaaaaaaacaaacaaggaaacaacaacaaaaaaaaaaacacaaggggaatagaaatgcagagcgaggaaagctccagctctcccttcccttccgccagtggccgccatgcagacttattcccataagcatctccagactcctttgggctatcctgggcctcctccggagctgggcttaaagctcttcttcaaggcagccaggggccaactgaaggcaataagcaaaggcaacttctccctcgcttcctcacaccttcccttcctcacaccttcaagctccccaaccccagcttcctagccccttaggggagggaagtaaaatgaaggagtgatgtcagacaaaccagaggggaagatcagaataggggtgtgctttgccaaatcctctatggtgaacagaggaaagacattgcggcagggatgaggaggagcctgcagagggagctcagtggagtctggaccatgcccaggactgggcatctttcaatggtaagtccaggcaaggccattgtgtgtctatttgttacatgattatccccttcttctcttaatccctaatcttgtcttccccagagacacattattttctttttaatcaaggtataatttgcatatagcaaaagacacataagtgtagagacagatgagttttggcacatgcacagccacgtgcaattcacattcctattagaatataggatgtttccatcaccccaggaagttccatcattatccttcccagtcagtgcctgccttcccacccatccaagcaatcactgttctggtttccatttctaactataaattagatttttcctgttctagaattttatagaaatggaattctacagaatgaactcttttgtatctggcttctctcacccaccacaatgtttctgtggctctctgttgcgcataaccataggccactcatttctactgctgatttgcattctgttatgtgattctaccacaatcttttcatctgttcttttaacgaatgttggggttccttccggtttttacccattatgaatcaagtcgcggtgaccgttcttgtacaagtcttttgcagacatatattttgattcctcttgagtaagtgtgtaggagtggaattgctgggctctagggtaaagagtatatttaattctatgagaaactactgagatggtttggctatgtccccacccgaatctcatcatgagttgtagttcccataatccccatgtgtcacgggaaggacctggtggaaggtaatagaatcatggggggcggttaccctcatgctgttctcatgatactgagtgagttctcacaagatctgaatggttttataagaggcttttcccccttttgctcagcacttcttgccactgcaatgtgaagaaggacatgtttgcttccctttcccccttctgtcatgattgtcaagttttctggggcctcccaagccatgctgaactgtgagtcaattaaacctcttttcttgataaattacctagtcttgaatatgtctttattagcagtgtgagaaagaactagtcaactatcaaactgtttttcaatttggtttcaccatttttcatttagccaacaatgtaagagagctctgcaacctgtttattccatatcttcaccaacatttagcattgatagtcttttaaattttaagtatttcagtgattctgtatagctttccaaatatggttttaattttcatcctccttctgatcactttttatatgctttttatatgtcattcaaatatctttgtgaagtatttgttcacacgttttgcctatttttaatggagttctcttattcttactgagttgtatgaattccttatatattctgaagaccagtccttttccaaatgtgtatattacaaaatcttttttcttcatctttagttgccaactaatatattttattcttttattaacatgcagtaaattgagttcttttggggtacacttctcttacttttaacacatgtagagattcatataaccaccattacaatcaggacacagagcatttgtgtcaccccaaatgactctaacctttgtgggcacatgctccccacccataacccctgggaactagtgatctgttctctatcaccatattatagtttttttaaaaaataaataaacagaacaccatataaatggaatcacaccatatgtaaccttttgaggttgacttctttcactcagcatctctgagatttttccaagctgctgtatgtatcagtagttcattgatttttattgctgagcagaattgcattgtaccaattcacgtttaatcgtgtttttttttttaataagcagaagcttttaatttggaccaagtccaatttatcagttttctctgttatggtttgcagtttttttcattacatataacacatttggccactgaaaggtagtcaaataatatattctcctgtgtttatttataagacctttatatatagttttagcttttacacttaggtctataatctatcataaattaatttttgcatttagtgttaggtagggtttagtttttattttttcagtatgggtatatctgttttttaaagcatcatttgctgcaagactgcccttttctcattgaattgccttgcagcttttgccaaaaatcagttgtgtgaatttatttctggcctctgtattctgttcacttaatctatttgtctgtttcacaccaatgcaaactgtcttgataactttagtttcacaggcagtcttaaaatcaggtagtgtaagttatttaactttgttctctttaatattgctttggttattctaaatcctctagatttccataaaaatttaagattcagcttgtcaaagagaagtctgctggaatttctatttggatagcagtgagttaaatttcggagatagaatattacagcaacattgaatttcaatccatgaacatggtatatatctcttcatttatttaggtcttctttaatttttcttggtgcattttgtacttttcagtatagaagccatacatatattttcttaagtatttttattttattttatatagtattttaaatttttattttctaacttttttgctagtatataaaaatgcaaatgattttccagaattgatcttatctctagtaactttgctaaattcacttatttctgactatttacagattcttttggattttctacatgtacaattctacatgtataaataattatagttttatttcttcctttccaaacccgatgaattttatatatttttctgcctattgtactggctaaaccctccagtacagtttagcatggatgtgatgaaagtgaatttttattgcttgtttttgatattaggggaactctatcagattgagaaatgttccttctagtcttctttcacaaaaaagtttttttatgaataagtgttgaaaattagcaaatgctttttctgcatttattaagttcatcatatggttttttccttctttcattctggtaattctggtgaattagattaattttttaatgttaaaacaatctgatgttccattaataatccatttagtcatgatgtattatccatttttatgtatattttgttaagaatgtttgcatttaagttcatgagaaatactggcttgtaattttcttttattttaatgttcttgtttggttatttattagcattgagctaggttcatcaaaacaggggtgatgtgttcctttcttctctattttctgaaacagtttgtgaaaaattcgtattttttgaaatttgatagaattcaaaagtgatctaatatatgagtgcttttgataggaagagtgtgataacaaatttaatttatttaacagatacatagctaatcagtttttatgttctgtgtgttaattttggtaatttttatctttcaatgtatttttcaactttaagttgttaaatattagatataaagttgttcatagcattcccttatttatacttttaatgtctgatttatttctagtgatcatcctttttattaccaaccctggaaatttgtgtttcccctcttctgtttttaattaacatagttagtaattcatcaattttcttaatcttttaaagcaaacaacttcttgttttatttattatcttcaatgtttgttcaatttctgttcactgttgcccttctactttcatgggttttatttacttagtttttttcttatatttttaagtttagtgcattgaattttggcactttattttctaatataaacttttaaggcaatacattttcctctaagcattgctttggctgcatcccctaaaatttaataggttgtattttcattgtcaattatttttaaatatttctcatttcccatggtgattttttccttttgatgagtaggttatttagaagtatgtgatttattcccagatatatgaggattttccaaatgtatttgtcattttttttttccaattttaatttcatattgtcagagaaaaaactctgttttaaatcttttgaaatatatagagatgtgtattttagtaccactagttctatcttggtgaatgttccagatgcactaaaaaaaatgtgtattataaagttgttgggtgtcacattctgtaaatgtcaactaggccaagttggttaatattgttcttaaaatctacttactctatcaattactgaggaagaagtattggaatctccagccataactgtgaatttatctatttctctttttagttccttaagtttctcctttgtgtttggaaacgttgttgttgtgtcaagatattgttagtattgctattcttctttttaaattacccatttatcatcaaaaaatgaccttcttaatacaagtaatagccttttctctaaatctctgtgtctaatattaatagagccatgctagatttcttatgcttacagtaagcatagtataaaggaagagtgtttttcttgaagtagcatatagttacattttgctctgttaccaagtctcactatctatgccttttaattggattaaagtttgggaaagcttaaatggctggaacttaaaagacaggtcattaaagaggaacttcacagggaagtaacccaagcaatctacgtagatgttccctggagtttttggcagaattctaagacaggcatgcacatggtatcactttacaagaccttggaggggggaaagaaagctacaagacagaatgtgaactgaatgacaattccagaggatatatagcactgggagtcataggagatttattcagccaggacagagaaacccctctaaatattccaggaattcagttgagaccccatacaggccacatcttcaaagcagtatatttcaatctcggaaaaggaacaacttctctcccactctaacaaagcctaaaaacaaatcctaacatgatcaaactgatttcccaataattatctataaataaaactcaacactctttagaccaagatggcaaaatatattctcaactatgtagcattcataatattcagcacacagttaaaaaaatcactagatatgcaaagaaagaatattttacctttatccagaaaaataaataaataaaacttttctgtagaaatcgactctgaaatgacacagttattgaacttaggacacaaggactttatagaagccattataaatatgttcaaggatttaaaataaatgtttaatataatgagtgaatgagtgggaaatctcagccaagtaataaaagctatttaaaaaaaataaataaaaattctagaataaaaaaaatgtaatctgaaatgaaaatttcactggatgcaattaatagcatattgaacaatgtggtagaaggccagtaaatttgaagatagatcagtagaaactatcccacctgaagcagtaagaaagaaaataccaataaattagtagagactcagagacctaagtaattcaatcaaatggtttaactgggatgtcagaaagtgaggaaaattgggagagaacaaattatttggaaaaaaatgactaaaatattgctgaactttatgaacaatatcaacacggttgacactgaaactcaacaaatcataaacaggagaaacataaagatatatgtagacacattacagccaaattgctaaaaatatttttaacacaaaaaaaatcataaaagcagccatagataaaaatcatttaacatacaagaaaaaagcaatatgagtactgctaatttctagtcggaaacaatgcaagttataacacaatggaatgccatattttaaatactgaagtaaaaataagtcaacctagaatcctatgtccagtaaaactatccttgaaaaatgtggtcaaaatgaagacattttcatcaggcttcccttttgcccccaaagtaattggctgaagggaaataacagcagatgtacacttagtccacatgacagaaggaagagagggaaaaaaatgtcaatataaaagacatttttaatttcagcactttggcaggctgaggtgggaggttcacttgtggccaggattttgagagcagactgggcaacatagtgagaccccatccctagaaaaagttaaaaaaaattagccgggcatggtggcacgtggctgtagtcccagctatttgggaggctgaggtgggaggattgcttgagcccaggaatctgaggctactgtgagccatgatcgcaccactgcactccagcctgggagactgcaccccagcctgggtgaccctgcctcaaaaagataaattttatttaaaaaatacatttttcttcttttgtatcttctttataagatatctgactgcttacactgaaatgataacaatttattgggcatataacatataaagtaagatacacaacaataatataatggagatgtggatagaaatgtactattggaatgttcttcattatacatgaagtacatggttttagttcatggagcactgaaacaagttgagaatacataatataattcctagatcagcttctaaaataataacccaaagaagcatggctaaaaagaccatggaagaaacaagatgaatattaaatatacacaattaaaccaaagaagacaggaaataagaaaaaggggaacaaaaagcagaaggcacatttagaagaagaataacaacttaataaaagtggccttttgggggtttcaaccacatgcctgtgatgtttattaagaaccaattactcttgggcagaaactgagtaaatggagatctcacctccaatgtatgaaaacagatgctttgtaaatttcttccagttttatagctgtttatagtgggagagtaagtctaataccctatactctgtcaaggtcagacctggacattagtgcatgatttgcacttaatagatgtctttgctaatcctctttcactatgtttacttatattttatttctggaaaaatatagcactttggccctttaagttctgttagtattgtagtatatttctcaatgtatttcttatttttatcatccaacattgttttggggccaactttatttctttgcattacagtgtaatattccaccacctatgtaaactgcactccacttatcctttttacttgctcattagatgccaagcaactcttatgttgacgcaaacaacactgcagaggaaatcgtgaaatatatccctggggtatataaagttgcacactttctttaattggatttaatcggttaacatgacagtttttaggatgactcctttttgatgaaaacagtagagaaagtgtaaaccaaagccagggagatgcgtggagaaggtgattagtgggagaagcctttgctgtatgtctgtccactactatcacaatcttccaatgatgcaataggtacctacaggggcctcccctaaaatcagagcccatctgcgaccctggtttttcccagtgcctgtgtggcacagggaggcctcatgttgctgatgaaagggagacgtgtgaaagagaaaggatcttctcttgtcattgctaagcctgctctgccttttttttctgagcattttttcatgactccaagtctgtaccagactttcccatacatatgacgcgacatatctggcctctgtggctccagtctgaaattttctttcactcaagaatcctttaaactatttcagtcatattttgcaggaagcagtctctgtcagtaacaaatatccaactccatcacctccacactcttattctccttggagaaggaagccctctgtggccatgtccccagatgcccactggatggtggctgtcttgatggatgagggaacaatctcaaaagacttgaatgccacagccagtagcacttaccaaatgccaggcatgttccaagcaggtccatgaattatgctgggtagacaacgtggcacctaattacctgtgtcgcgatcctgcatgttatacttactagttgtgtgagcctgagcaagctgcttaacctctttgtgcctcactcttctcataggtaacattgtgagaatcatctttatcccttagggtttttccaggacagtgcgagcctttgtaaaggacttaaaatctgtaaagcacacagtcacatacattatgatgtggataactggagaaatgcattattttctttggaaaggagaacaaatactgttatcataatgtatttttgttaatttttttggctggaaaattggcaatgcaattttaaggttagcttaaattcactggtaagaattagtagaaattttttagaaaaatagtaatgttttctggttcaatgaggagcttgctagttgctactctatcttaacaacatgtaaaaagctgaacaaactggaaaataaacagctcttcttagatcccaaagggaagtgagttcacaggacaaatcaccgaccccaaaattagagacagataagcaaatacagagaatcacaacttactagatagaaattcatgagcagaacttctgaaggaatcagcgccaaagtcgggaaatctgaactgtaattgatgacttattggagtctcagtgtggataaacctgagagttaaaaactctaggtggactagtcattgggtatccctcacaattaagtgagttttaccccctggagctggaccaggttcccacactgaatactggagaaaaatcccctcatgcttctggcagaaggaggtgaaaaacatctaagagtgcatcagagcattctgttcttcttaacaaggtctgcccttaggagaaactattcaaccagagcctaacctgctagggttttatcagaacttatctcacctggaagaaaggaaatacccaactccacaccattgcagccatcctgtcccatctaagtggcagtggggtggggagattgagaagcacttgagaagttcacagtccagaagcagaggctcattagaagactgagacccaatcacaggtctagagaatgcaccccttctccctgcaccttactaccactttactaaaggcctatttacagcatttctttttatccagtacatattgaccagctatcaagagaaaagtacaaggcatactaaaaagcaaaacagtgcagattgaagagacacagcgagtgtcaaaaggagactcagatatgacagaaatgttggaatgatcagatcaggaattgaaaacaactatgattaatatgctaagagctctaatgtataaagtggacaccatgcaagaacagacaggcaatgtaagcagggagatggaaattctaagaaaaaagaaacaaaaagaaatgctggagataaaaaacactataatagaaatgaatcacgcctttgatgggcttgtagtaaattggacatggctgaagaaagaatctctgagcttcaaaggtatctcaatagaaacctccaaaattgaaaagcagggagaaaaagaaaaaaatgggggggaagcagagaataatatctgagaactataggacaaatataaaaggtataacatacacatatgggaataccagacagagaaaagaggagaaaggtacagaagaaatatttaaaacaataatgccccaaaatttcctctcaaattaatgtcacacaccaaccacagatctaggaagctcagagaacaccaatcaggaaaaatgttaaagaaattacacctaggcatataattcaaaatacagaaaatcaaacataaagaaaaataattccccaaagaagccatagggaaaaacaccttacctatagagaagcaaaaataagaattatctctgacttctcctcttaaactatgccagcaagaagagagtggactgaaatatttaaagtgttaagagaaaaagaaacatcttaaaattctgtaccctgcaaaattgcttttcaaaagtgaaggagaaatagactttttatacaaaccaaaatgtagggattcttttatttatttatttatttatttttgccagcagacctgccttgcaagaaatgttaaaagaagtgctttagagagcagggaaattctataggtcagacacttggatctacataaaaaaaggaagaaaccaaaggagaaataagtgaaggtaaagtaaaaattttatttttcttacaacaaatacatttattcaaaataaaaatagcaaaaatgtatttgattatgtatgtgtttttgtatacatgcatacataatcaatatagtcatgtgtatacagacacatataatcaatatagttatgtgtctcttaacaatgaggatactttttgagaaatgagtcagtaggtgattttgtcattgtgtgaacatcatagtgtgtacttatacaaatctagatagtatagcctactgtacacctaggctatttattatagcttattgcttctaacctacaattctgtacagcaatacagtattataatattatggttgaccaaaacataaggcatgacattgtgtgtgtatgtgtgtgtgtgtatgtatacatgtatatatttatatgaaataaatgaaaacaatgacataagggacgggaaggaagaattaggagtattttgttattaaagtattcacattatccatgaagcagtatagcagtatagttacactacagttattatagttatttaaaagtggacttggattagttgtaaagatatattgcaaactctatggcaaaaactataaaaagaaaaagaaatataactgatacactaagaaaagagggaaaatgaacttatataagtttttcagttaaaatcacaaatggcataaaaagactgggagataacaagaacaaagggaaagagcaatgattggtaaacagcaatgaattttgcagacattaattaaactacattaataatcactttgaatgccaatggttaaaatattctcattaaaacagacacattgccagagtggatcaaaaaatgaaatccaactataggttttctagcagaaacccactttaaatacaaagacacatctagattaaaagtaaatggatggagaaagacataccatgctaacactaatcaaaagaaagtgggagtagctatattaatttcagatagagcaaataagctatcaggaataaagaatggcattgcataatgatgaaggagtcaattctccaagaaggcataacaatccttagtaaagttgtgcctaacagtgcatcaaaatatatgagctaaaaatgggtagaactgaaaagaagaaaaaatgaatccaatattatacttagagacttcaacactcttctatcatgaacgaacagacctagcaaacagaaaattagtaagaacacagttgagctcaacaccaccatcaatcaactgtatataattaatatctatagacagcttcatttagcaacctcaggatatacattcttctcaagctcatatggaaaattaaccaagatagaccacattctgggccataaaatacaccttagcaaattaaagaaaatagaaatcacacattgtctgctctcagaccacaatgcaattaaactacaaatcaataggaagataggtggaaagcccccaaatacttggagattaaacaatacacttcacaataacacatggtcaaaaaataaatatcaagagaaatttaaaaatattttgagataaatgaaaatgaaaacacaacttataaaatttgtgagatgcagcaaaagcagtgcttacaggggaatttatatcattaaatgcatatattagaattagaaaaaaagaaagaaccaaaattaatcatctaggcttccattagagaaaattagaaaaagaagaacaaattaagtctggaataaggagaagaaaaaaatgaaaattagaagagaaatcaatgaaattgaactcaagaaaaaaaaaatagagaaaatttatgaaaccaaaagtatgtttttagaaaatataagtaaaattaaaaaccggtgccccagctaaccaaggaaagacaagacacaaattactaatattagaaatgaaagggggcatcactatcaatcccatggacattcaaagcataataaagaatgattataagcaatctatgtccacaaattggtaacttagattaagaacctattatttgaaagataaaatgtactaaaactcatataaggagaaattgacaattttaataggcttatatttattagcaaaattgaatcaatatttaataattaaaaacagaaagcaccagctctagatggctttactggtgaattctatcaaatatttaagagaaaaataataccaattctgtagactctgtttcaaaagtagaagcccaggaaatattgtctaactcattctgagcagcccgcattacatttatactaaaaccagacaaaaagacatgacaataaaagtaaactacaaaccaaaattctcatggacatagatgcaaaaatcctcagcaaattattaaaaaattgaatccaataatgtgtgaaaataagtatggaccacagctgactgggatttatccctggtatgcaaaaacagttcaatatttgaaaatcaattactgtaatctaccacatcagcaagctaaagaataaaactcacaagaccatatcaatagatgcatacaaagcatttgatcaaatctaacatcacttatgataaaaactatcagtaaaccagaaatagagggaaacctcataaagaatattcacgaaaactgacagctaatgtcatagttaatggagagaaactcaaagctttcccactaagattaggaacaaagcaagaatgttgcctctcaccattattttcaacatcatactggaagtcctacctgatgcaataagacaagaaaaggaaataaaatatataaatgatgggaaggaggaaatgaaattgtctttttcacagtgacatgattgcctatctagaaaataaaaagaagaaaagtactcctgatactaataaataattataccaaggttgcaggataaaggttaatacacaaaagtctattgcttttctaggcagcagcaatgaacaagtagaatttgaaaataaaaacaaaataccgtttatattaataccccccaaaatgaaatacatagatataataaatctaacaaaatatgtacaaaatctatatgaagaaaactataaaactatgttaaactaaatcaaggaaggactaaataaagaggtattcatattcatggatagaaagatttaatattgtgaagatttcacctattcccaacttgatctatagactcagcacaatcctaatcaaaatcccagaaggttattttgtagatattgactaactgattctccgatttacagggagaggtaaaaggcccacaatagccaacataatattgaaaaagaagaacaaagttgtgtcactgacttctagacttactgtaaaactacaataatcaagatgatgtggtatcgtcaaaaaatagacaaggcagtggaacagaataaaaaccccagaaatagacctataagaatatagtcagggccacgcacggtgactcacagctgtaatcccagcactttgggaagccgaggcaggcggatcacaaggtcaaaagatggagaccatcctggccaacatgctgaaacctcatctctactaaaaatacaaaaattagctgggcatcgtggcgggcgcctgtagtcccagctactcaggaggctgacgcaggagaatcgcttgaacctgggaggtggaggttgcagtgagccaagattgcaccactgcactccagcctgatgacagagcgagactccgccaaaaaaaaaaaaaaaaaaaaaagaaaagaaaaaacatagtccgatggtctttgataaagtaccaaagaccataaaatagtaataaataatcttttcacaaatgatgccaagacaacagaacatccacatgaccaaaaaataaaataaaataaaataaaatctagacacagatcttacattcttcccccaaatgaatttgaaaccactaaactcttagaagataccacaggagaaaatcgaaatgacctagggtttgatggtaaccctttagatataatgtcaaagggatgatccatgaaagaactaattgataagctggacttcactaaaattaaaattttctgttttgcgaaagacagtgtcaagagaattaaatgacaactcacaggctggaagaaaatatttgcaaaagacatatctgatagaggattgttatccaaaataaacaaagaactcttaaaactcaatgaaagaaaacaatgatccagctgaaaaaaatgcgccaaagaccttaacagacacctcaccaaagaagatatacagatagcaaacagtctataaaaaggtgctctgttccatatgtcattagggaaatgcaaattggagcagcaattacatacctctatatacctattcgaatggctaaaatgggtaacactgacaacaccaaatgctggtaagaacatgaagcaacagaaactctcactcattgctggtgggaatgcaaaatgaaacagccaatttggaagatagtttgggattttcttacaaaactaaacacactcttaccataccatcctgcaatctcactccttggtatttacctaaaggactcaaaaacttatgtctgaaaaaaaaaacctgcacatggatatgtatagcagctttattaataattgccaaaacttaaaagcaaccaatatgttcttgagtaggtgaatggataaataaactaaaagtctggtacatcttgactttggaatatcattcaaggctaaaaagaaatgagctactaagccataaaaagatacatagaaaacttaaatgcatatcattaagtaaaataagccaatctgataaggctacctactgtgtaatttcaactctgacattctggaaaaggcaaaatgatggagacagtaaaaagatcagtagtgtccagtggaggaatggaggggaggcaggcgaacagacgaagcacaaaggatatttaggggagtgaaacaattctgcacaatactacgatgttgcatactcattaggcatttccctaaatctatagaacacgcaataccaagagtgaaccctcatgtaaaatatggactctgggtggtgacgatgtgttaatgtaggtttatcaattgtaacaaatgcatgcaccaccacagtgtgggctgttggtaatgggaggctgtgcatgtgtgtgggaaggggggtgcatgggaaatctctgtgccttctgctcaattgtctgtgaatccaaaactactctgaaaaatgaagtttattttgaaaaaaaaagaataatgatgaagtgggctttcaaataccacatattaaactgtactttaaagcaagtataattaaagcagtgtggtgtcaggggaaaaaaatgtagacaaatcagttaaaaagaagaaaatctcgaaaggatcccaacattgtgacagtgtcgtgataggtgcctattgaatatttatgtaataaatgaatacagcttagtacaacgttaaaagtatcatttcaagacagtaggtaacagaaaattactctacaggtaggtctggggcaaattgtaatcatttgatttttaataatggttaaattattctctcaccctgtactatcgcccaaatacacacacacatacacagatggatgagaaagttataaaatgacttaaaaatatcaatctcttcgtgttgattaaatgttcatgttaaatctaaaaacaaagggagccatcaaaatcaaaaagagaaaaagcttaaaagatttgtctacataaaaataaatacataatgaatgtcatattgctaaaaaaaattcactatgtttgacaagttgattttcttgataagtcatagaatttaatatggaaatatcaatgattttggggaaaaaaactgactaaaggaataaataagccacactacaaagaagcagtctacgtggccatggcatcacagcttatgtctaatcccctttgactagagtgcaggagtgtgtgattaaactgagcaggaactaatgtgggcttcacgagtggccgccactgtattcattcaactgctgggtggaagagcggcttccctcttccttcctcagaagaccagagatgatgatttaagaaataaaagttggaaatgtcttatttcaagtcagattacaatattaaatgttagaaagcactgagatccagtttttaatggaaatatcatctattgccattatttgccaaattaaaaacccataaaaagtcatggctgggcgcagtggctcatgcctgtaatcccagcactttgggaggcccaggtgggtggatcacctgaggatgggagtttgagaccagcctaaccaacgtggcagaaccccatctctactaaaaatataaaaattagctgagcgtgctggcggtgcctgtaatcccagctactcgggagactgaggcaggagaatcgcttgaattctggaggcggaggttgcagtgagctgagatcgtgccattgcactctggcctgggcaacagagcgagactctgtctaaaaataaaaaaaaaagtcatgatctttgagaaaaattagagaaaaagataagctaatgtagaacaatttactaaaataattcacaaaaaaataacaatttagaaatcactaatgacaacaccaaagcatataaaattgtaatttcccaggaaatacatgtagatgtctagatatcgctgtatgtatatgtatatttacatacataatacatatatgtgtatatcaatatatgtatatttctttttttaaatgtgatattccaagctatttgctgttttgtaattttttcaattcatataaccattttctatttaaaaagagttctactcctctgcattttaaatgccaagtaatactccactgtttgtgcagaccataattttttattacccaatcattattgggtagttagatcacttccaattttttatatttgatacaacactgacctgcctgtggttttgctcaacattcatgaacacacatgaaattttccaagggtaaactcttttttaagcccttaatatatgttgccaaattaccttctgaaaccttctacaatagactctcacctgaagtgggagggatatttttaaagtcagtacatataatacaaaatgctggtcatcaaaattgccctggcacatcttttaagaaaatagtgttggagattgacattcagtaattcatttgttcatgcaacaactgaaacactgtttattgagtaactagtctgtgtcaggcatagtgccaggagatggagatgggacagacaccgaactagaccaatatattcactgtaaaaagctattctggtggagagagagaatgaaaattaagcctaacaatcacaaaatttctaaagcattagaagatgataagtaatatagaaaaaaaaaagactaggcagggctaaaagagaagtatgtttggaggagggtgccatagaggtttagatggtcaaaggaagctccattgagaagaggtgacttgaagaaagtgagaattgagctatgcaactagctggtggaagggcattcccagaagaggaaacaccatgtatgaatgccctgagaaggaggcacaattggcatgctgaaggaacaacaaggaggtcggtgtgtccaaagaccagtgtgtggcaggaagagtgaaggataggaggagaccagagaggtgagctaggcagggcattgggtggatatggactttttcccagaaaggaatggaaattgtggagcatgtttagcaaaggcatgacatgagtgacttgttttaaaggatctctctggctgctccttagaaaacagactgtagggcacaaggtgggggtgggtagcaaggagagccatctttgcagttcttatgctaggagctgttaggctttaggggacatctggtatgagaatgggtccttaaacatgagtctcagatccagccctcgggacggtcacaccacacagacccagtgaagaaacagctctggggagaaagcagcaggatctcccctcaggtgctcactcctgagcacacacacagagggaaacgatgggtggtaaggcaggctttaggtacatcttccttccttctgcccttccttccttctttccttttctcttccctttcttcttccctctctcccttcctttctttcttctcccctctcttctctccttccttccttcttccctcctgtattagcctgttttcacactgctacaaagagcttcccaagactgggtaatttataaaggaaagaggcttagtggactcacagttccgcatggctggagagacctcaggaaacttaaatcatggcggaaggtgaaggggaagcaaacaccttcacatggctgcaagagagcgaagtgcaagcaggggaaatgccagatgctcacaaaaccgtcagatctcctgagaattcactatcacaagaaaagcatgggggaaactgcccccatgatccaatcacctccttccctccacatgtggagattacaatttgagatgagatttgggtggggacacagagcaaaaccatatcatctccctttcttccttccttcttcaatcccttccttccttctttcctctcttcttctcttgctccctctcttccttccttttttctttcctcccttcctccctctctccttttctttctttccctttcctccttccctcccgtccttcctctcttcttctttctttcccttcccttccttccttggtacctccattcctccttccctacctccctctctccttctttctttcccctttttgggggaggggtgtggtggacaaatgcagagttaaaattatgtaaattaaatttgtcaaatatatcactccactgtagcaaatttcattactgcttgtacctccttacacttaccccagccatgagtagaatgttgttgttattgttgttttaatctttagatgtgtgtagacagaatgttaagttactgacaatgctataggcattgctttgtttgctagtgcaaaggatcattttttcccagcttcttggctgtccatgtttccgtcctgagttgtctttcctgcactttgcaggcatggaaaccttgttccacacattgcctggtgccctgtccagcgctgcaaggtgcactgcgtctcctctgcccagcaagccacaagcccctccagggtgagaggagagccttcccttcccttggtcctcccttcgacacagggagctggagctggacagccccataggcactcagtaagcacacaccatgtagataagttaacatgtacctttgaaaaggtggatcacggggattttgtaatgatgcagcagcgaggatgctttgaggatggaacttggggtctttcaagttctcagtagggctgcgatccttcctggactctagttgtatcctgcagaggtgtaggagatgagccagtgaggtgccattctggagaggttccttgtcggctgttcatgaacacaattgctctttcacagctatcagtccctgagcagccacccttcaccaggtttggggccaagtgccttacacttgttaccttatgcaattctcaccctaagcctgcgataccacaatttttataatttatcatctacaggtgtgaaaaccaaggtggaacattttagggactctcagctagtaagtggaggcttcctttcctgccccttttttattccattatggacagagctgactgtatctctgcattcactgcaagtctgcgttgctccctcaatctttgatccacttctttctcctgaagggcactgaaatactggccgtttatggctcctgaaacttgggatgggaggacccagagagctcttttcaccaagagtgtgacctcagcagctttcattccttcctggccccagctggctctgggctgagcccgcttcaccagggagcaccatgtgaagatgagtctcaacctggagtctgccatttgtttccagtccttcactgccattccaaagagaggaatgactgcccgaccctccatctggggcagactcagcccaaaacagaggctgttggcccctttccccacctctcagctccttagcactttgaatccaatcctactctttggaacttagctgataaatacaaggctgccttttccaaaaatgtttctgaatagacaaactagaaactttataatttggaaatagtattcaaatggctctaaagacacatctagggctatgttctattcttggggaaattctagagatacatggttggctggatggagggatgaatgagtgggtggatgagtaggtgtgagtggatgaatagatgggtggatggatgcatgcatagatgaatggatggatgaattgatgggtgagtggaagataaatgaatagatggatgggtgaaatggatggatggatggatggatggatggatggatggatggatggatggatggataaatgaatggatggatgtgtgaatggataaatggatagatcgatgagtggacagatgaatggatgactggatgaatgaataaatgggtggatgattggatggattaatggacaagtgggtggattaatggatggatggatggatacgtagatggatggatgggtgaatagatgggtgggtggatggatggatggatagatggatgagagaatgggtggatgggtgtatggatgaatggatggataggtggagagatggatggacagattgatttctctcactgaacaagtaccaacataggcaaaagcaaagcaagagacaccaaaagcatgttttattttgggagaaaggaaagtccttggaaacacaagtccaggcctgcaaaatccttgggctgcttcaccattctgggagcagcaacatgtccttcagctgtcttatattcccttctccagcaaggacataaggacacgataaatacttaaactgcagcaagaaaatttcaagttattctttaaaaaaaaacttttgaaatagccatttgataatagtagacatcagcccctaagtagaaagaaatctatttttcagcatttaattcatacaaaatcttccattttcaataagcattaatttaacacagacaaaatggctatagggtgacagaatctcatctctatatgtagaagatttttaaacaaaaagccacgtttatattttattgaattccaggggcctgaaggcaggtaagttgttgggataacccctgcaatctgccccaactttctagtgttatagaagaaacaatattgaggaaagtcctaggtttccttttctaatttttttagtcttgcaacattaactaacaagaattttcttccaaaattgcagaaatttttctttaagactaggcgggaagagtggaaataaaagtcaaatctaaaacctgcaaacataaacctggagcaggcgagagaccattattgctggtgtctgttctcagctatagaatcattaacatgaaataccttttaatgaatgcattgaaaaaagtgattatatattaaagtacaaaagtctattcctgcaccatttaaattactttacaatgctgattaaaataacagaacattatagcttgcttagctaaccattatatttccaaatccatttccaattgtttcccttcaatttgaacaatttttgagcaattttattgctattcatacctgcttgattttttattagaaattaaaatacacaggttttttatcaatgttgtgaagtactgcaaagtttaactcttttgatgccattcagaacctcaagtcacagggagaagcaactttttttctctcttaattccaggggcttgaagaagatatctagaaatgtcaaagcagaagagcctcggagataatctgaactatttctgagtttatataagggaaaactgagactggagagaactaacatgtctaatattacaatggaaacttgtaataaaaccacaaattgagtcaagtctcctgattcactatatgagcttcttttgactctaagaaactgtccttcacaaagttcccaagaaagaatggattggccagatcgatagaggaatttctgaggaaactgcacttgtgtttttatatacttggcacttattcatgctaaacagtagtttagtgcagtggtggagaaaagaatccctttgaatgatacctgattaatgtgtgtataaagcacacaggcctataaaatagtgtggaatatgggacaagctatcttgatgccaagccatggaatggacctgtgtgttacccaggacaagctccttgttctaaaacctttatcataagtgcaacgaatgactgcctttgctgattatagaaacctctgtcctgctcgtggcaacacccttagcaccaagcacagagcctcacacagagaatgtgttcaagaactcttcagtagataaatgaatgaatgttcctccatcatatggagttttggggtcccaagcaacaaaaatagatgctagttaacgtgaggaggatatgaattggtttaggatatcaaagcaaaagctgaattaacaaggggtcctggaaagttgggggctgagcagctccaggcctctagactgaagaaagtaatgaggtctctttgggcatcctgctgggataaaccctctttaataatttcccatctttgtcttcctcatcttaacattcaggctcccaagaaagagagtccaattggccgagcttttatcacacgcctgtctgttggcaagaagggctaggaaccctgcaatgtagttcatgaagactgtatacatggaaaagggaagtcaaggtgctagtattagaagaaacaatgaattgtgagcagataaaaacatcacatatccactgtacacttgagcttctccttctcctgtagagtgagtgtagcaatacctaacttgcagggtccttatgggaactggaaataggattagaagagtcatagcataattccctggcacatagcatggaacctatcacagctggttttatgtaggggcagtgaagacatggtttaccacaagtcgtggctttcccaatgctgattcctgaactgtggccacactgttcctctttcagaggtgtttgacaacacactcttccatgtgcagatcttacttaccaacgctaccttcattacaacatttcttcagccccagccataaattgagttgtggaaggcccaagccatgccaggattttaggacggctggggttggtatcaggtggagctgaggctaggaaaccaaaataggatgtgagctggacctgaaggtagtggagcagtcaggatcccgatgtctgaggtgtgtgatgagcagaaggccatgattgaggatctcaagaatgaccccagtttgccagacgccaggtccaaggccactgacagattccctggtagatttcaaatggactcaagagcctaaagacaaagaccttatgactccatgtagaaagcctgggactgagctgcccgtgggtgcccagccaggtgcaggggaaaaaaaagaatgctaactgaaaattaactgatagtctaaactgagcaatgagtttggagactccaattgcaaaagtaatgggaacaatgaaaagaagagtattccttgggactcagtgcagtaactaataattactggacacttgccatttgctgggtcccctgctagggagacaggacagagtagtgattaggggcacagatccaggattcagatcatctgggtttgaattctggctattccactgagtggttataggacttcaggccagtctcataacccaccctaagtggggatactaggagcagtttgtgcctgttggagcactaaattagatgattaatgtaatgtgctaagaccagagccaggcactgagaaggtgttcaataagcattaatgatctcattattgtcgtgttcgttgttaagcgtttggtcatgccttatctcatttagttctgagggtctgaggcagtgctaggaaagcatcatgggagacaggcatggtgggagctgagccctgacatgaatggggctaactcaatggcataaggtgtgggaatggtgtttgtcagcagttgggatgagcagtgatgccccttaggtgcagtgagggtaatcctgacttgagagatgaaatcctcaagggcccccaaccccttctccccattctgtggctgggtctcagccaaggtgtgtggagtggttgggtggggggttcaagtctaggaacaaagggagagaaggtcaggtcagtgagccatgtggaagcatgaacaaaagaaggggagttgattttgaaggaggtaacaaggcatagagctttttaaggacacttcatttgagagttagtggttggtagatgggagggtgaaggaaaggagaccagagtggaggagaaagggaaacttctgggaagatgtacttggggggatattccaagccaggcaaatgagtgcaggggaaatggaggtagggcaggtccagggaccaaaggtgaagcttggcctatagaggcacaggcctgggttggagggactctcaagaaaagcaggaatgggaaatcttatagtaatgtcaccaatgacataggctcaaaagggctttgcacctgtttttttcttcttgaaaccaagaagtttcctctcttccccacttctcgcctctgaatcactcagagatcagggctggtgacaagggccagtggcagaggcagtatgtttgaggagttcagaatgcctctccccaaagcaggaggtatatctagaaaaatgaagcctctgatctcctttcttctgtgtctcgggcctcaggctgcttccaggagcccagccatgcctggaacacgtttcatgagtgtctaggggttaacacttcaagaagaaacaggggagattttgctggtgtacactatgtcatgagaatggatctaacgagtgagaggaagctctgatcaagagctgaaaaacctgcacgattttcaactcaggaacccacgcgtaccaccattttcttctacgagaaacctcaacaggttacagatacataatttgaaagaaaacaaccttaagtaatgtgccattctagttaggtctaaattcacatttgaaaatattattcaactaattaaaatggaattaaatgaatacagtgttaactgtgtctagtgtttagcataaaatgttgttaaatatatcatactctgtgttccaaactggcggcagattttagcaatgtttaattgtaagaaatagccatgtactacttaattgcataagtaggtggaacataaaaatcacaattacatgaattatattaagtaaaatatgttaaaatagtttgtttttcgatggtggaattttatggacactataatgaaagtgaagtacatttttaattacctaattattgctattttcaaagtccatttacaccataattgttcctgttttcatagtccaaagagtccatgacagagagactcagtgggatctaaaataaggattcattcttcagacaactcctgctcatggtttccccctatctttacaaaatcgatctcagattcattcaacatgcattcaacaggtaattgtgtgtgtgaaattgctgggaatggtagcaggttgcagagatgagggaggggtagatttccagccctcaagcaactcatagtctaatgacagaggtaagatggactacagcagacgcagaagggaagcatggtcaggagttagagggacacaccaacttctcttgagcggatggatgcatgactgtgggctcctggacccggggaagaaggcaggactgggctagcctgggctggggcaggggcagtggtgaggaagggcatcccaggctccagcaaggacacagaggaaggaaaagcaggtggcatgaagtgttgtgaggcagaccagcccagtagcggcagacagccatgggcaaatggcaaaaagagattcagtggcaaagccagcccaggccagccagaccctgggagccggcagggagattccagcagtgaggagcggggagtgtggggtttcaatcagtggatttggggttcagcatgagccctttggcctgggggtgacaaagcaggagctgcaggaccctgagcactggaagacaacaaggccagtgacagcaacagaaggatcaagggaaaggtgatttaagtgaaaaacaataaatttgcttctggactgaggcgtgttgaggttatataaagatatccagggtagatgcttggaggcatgtttgctcagtagattgaggcttttaagccttttaaacaaacaaacaaacaaatccttgagagcacttttaagcttttctttctctctttttttttttcttttttgataccataggaaattttgagataaaaccgtgaaatgttagggcagtcccttaccacacatattgagttagtgtaatttgttaaaaagcaaaaaaagcaaagggtggccagacgccatggctcacacctgtaataccagcaatttgggaggccaaggcaggagaattacttgaggtcaggagttcgagaccagtctggccaatatggtgaaaccctgtctctactgaaaagatgcaaaaattagccgggcgtggtggtgcacacctgtaattccagctactcgggaggctgaggctggagaatcacttgaacctggaagtcggaggttgcagtgagccaagatcacaccactgcactccagcctgggtgacagagtgaaactgtgtctcaaaaataaaaataaataaagaaaaataaaaagcaaaaggctctcattatgtatcatcaggggaattaaaatcaaaacaacaataagatgccactacacccctgttaaaatagacaaaatcgagaacactgacaactcccagtgcttccaagagtactggggaactctgttaccggaactctgattcagtaccaatggaaatgcaaaatggaacagccacttggaagacagtttggtggcttcttacaaaactgaacatcctcttagcataccatcctgcaatcccactccttgatgtttacccaaaggagattaaaatttatgtctcacaaaaggcacatgggtgtttatggcaggtttattcataagtattaacacttgaaagcacccaagactgccttcagtaggcaaatggataaataaaatgtggtacacccagacaacagaatattattcagcactataaagacagaagctaacaagccatgaaaagacatgggagaatctcaaaagcctataataaagtgaaagaagccagtgtgaaaaggctatatatggtacaatttcaaccatacgacattctggaaaaggcaaactatggagacagtaaaaagattgactgggtgcggtggctcaagactataatcctagcactttgggaggcggaggcgggtggattgcctgaactcaggagtttgagaccagcctgggcaacatggtgaaaccccgtctctactaaaatacaaaaaaattagccgggcgtggcgtcatgcacctgtagtcccagctactcaggaggctgaggcaggagaattgcttgaacctaggaggcagaggttgcagtgtgccaatatcacaccactgcactccagcctgagcaacagagcgagactctgtctcaaaaaaaaaaaaaaaaaaaaaaaaaaaaaaaaaaatcagtggtgtccaggggtaaggagggaaggatgaataggcagagcacagaagattttaggacagtgaaactactctataggatactataatggtggatccatgtctttgtacatttgtgtaaacccatagaatgtacaacatcaagagtgaacactgacatagctatgtactttgggtggtgatgatgggtcaatgtaggttcctcagttgtaacaaaggtaccaccctggtgggggatgttggtaacggggtgattgcatgtatgtgtaagcaacaggaggtatatgggaaatctctgtatctcttgtgaaccaaaaactgaaataaagtctatttaaaagaaaaaaacgcaatggaggagaggagcagattacataaaaggaatgagcgtgctggcacttagcgcacgtttggtgcccagtcctcactctcattctctttagaataagtctacactctttcttctgagcctcgagctgcccctggagtttagacaattatcttcctttgaggatttgagaaaagttttcaaattgcgacaatttagggggattttattttttattttattcttatttctcactccttacttcttcctgcacttggaatcgttaacttgtgctgagtgtggccgccaggccatcactgctagaaaggacgagagattcttagcagtagtcagagagcacccgtcgggaccagtccttctaattctcaaaccaaatgaggttgaacaaacccgggtaagttttggcgcttccggctggttgttccaaatctttgaaagccctctgcgcactctccgtcattcatgtaatcatttaaaatatgtcttcctgtacaggaactgggtcccagccgcagggtaaccagaggctgcatgagtcactgtggttaagacagatcattgaattctcagctggcgtgacctcatagctgggaagccagagggcctgcgccagccaagaggagctagctttgctgatggtgtggtgcaggaagtgactctgccccatacctgagtcctttccataggaagtgagctgagtggagacaacagcagattgagaaagcaagaacagagtctttgattcttgagttttattcagctcagggaaagactgcattcatacctggataaggcattgcacctaagttgactgagacttatcactttcacatcccaggattaagtgtgggggtcctgaagacctatttcctaaagaatcaggcaggccgggcgtggtggcccacgcctgtaatcccagcactttgggaggccaaggcaggcagatcacgaggccaggaaatcgagaccatcctggctaacacggtgaaaccccgtctctactaaaaatacaaaaaattagccgggcgtggtggcgggcgcctgtagtcccagctactcgggaggctgaggcaggagaatggcgtgaacccgggaggcggagcttgcagtgagcggagatccggtcactgcactccagtctgggcgacagagcgagactctgtctcagaaaaaaaaaaaaaaaaaaaaaaagaaccgagcattcaaccctcatccatagaccattccctctttgccaaaaatgtaacaaagcaggaggggattaaaataaaatttttaaaaagttggcaggtaccaaatattgatacaaaaatgaagatattcggttggttggctatacatctccagtgtaggtgtttcaagcatttcccagacattagtcatttagataccacattcagaattgtggcgctatatcatgtcaatactaccctgtactcatatttttctttaatatgagtcaggtctttacttaaataaatttactcaaaaaggaaaattgctgtcactcactgggaagtcagaatcatctgtcataaattgtaaatcacacaaatgaatttaatgaaaacattaaattagaagcatctgtccacagagcacataaaataatcttaaataacatcaatgctatacaagtaaacaagaaacatcaaagaacatcaatggtataagtgtatacaagaaatatccatggtataagtgtagacaagaaatatcagaaatagggtaaaaatgtgagctttaaaaaactaaaactctgaagatagctggtcccaattgtgttgttttaaccataaaataaaatgattttttacattaataggaatatttacagaaaaaggttctaagctgggtgtggtggctcacgcctataatcccagcactttaggaggctgaggctggcggatcacgaggttaggagttcaagaccagcctgaccaacatggtgaaaccctgcctctattacaaataaaaaaattagccgggcatagtggtgtgtgcctgtaatcccagctacttgggaggctgaggcaggagaatcacttgaacccgggaggcggagcttgcagtgagccgagatcgtgcccctgcactccagccttggcgacaaagcgagactctgtctcaaaaaaaaaggtattataatttttttctatatataggatctatagtagagttttccaattggcttaaaaaaactattaaaaattaaattaaatttattattaaatattaaatattaaattaaattaaaattgttaaattttggaggaaaatcaccaaattctcaaagaaaaaccatacaatgcaattacttacaactcacgttctttatgatggtgtatgtatatatgtatacaagaaacatcaaagaacatcaatggtataagtgtatacaagaaatataattctttatgatggtgttatgtctggccatcaaatcgttcttaaatatttaaacttagtctgccagaatactcaagaaattcattttaggcctttttgggggggctcccagcccccaccatgtctcaagctgagcacacaactaggacccctatcagcaaggctcctggcctcatgaagacagcactttgctgcaaaaggagggacctaatggccatgctaaggagacagtaacacaaggtagtgtggtacagagggatgagagtcacctgagatcatcagaaaggctttcccaggaggcagcttttttttttttttttgagacagagtctccgtcacccaggctggagggcagtggtgcaatctcagctcactgcaacctccacctccctggctcaagcagttctcctgcctcagcctcccgggtagctgggactacaggtatgtgctaccacacccagctaatttttgtatttttgttttgttttgttttgttttgtttttgagatggagtctcactctgccacccaggctggagtgcagtggtgcgatctcggctcactgcaagctctgcctcccgggttcatgcgattctcctgcctctctcccgagtagctgggaccacaggtgcccgccaccacgcctggccaattttttttattttttattttttattttttatttttttgtagagacatggtttcaccatgttagccaggatggtctcgatctcctgaccttgtgatctgcctgcctcagcctcccaaagtgctgggattacaggcatgagccaccgcgcctgaccaatttaccaatttttgtatttttagtagagaaggtgtttcaccatgttggccaggctggtctcgaactcctgacctcaggtgatccacccgcctcagcctcccaaagtgctgggattacaggcattaaccaccgcaccccgcccaggaggcagcttttgaatggagacatgaaggactatgacacatccaacctgtgaaaatctctgtgtgcatggctggggttaaggggcagagacagctagtggcagaatgttgtgggcagaggaacaacaaggacaaatgcccaaggtggaacttgtgtgcaaaccttaaaggaacagaaagaaatccagtggtgctggaacagggcaacggggtgaacgagggggagatggagcagatgaggtcaaggagatgggcagggctggtggatgaaaggcgagaactcccttccaaaggacaaacatttatttaaagtgcaaagcaaatgttatagatggattttaagaaaagggaggtcgtaatctaatttacctttaaaaaaaaataaactagactttattttagagcagttttagttttgcagcaaaactgagcagaaggtacagagatttcccatgtgccccctgcatttgacatgcacagcctcctccattatcgacagcccccaccagttggtccttttgttacaactgatgaactgcactaacacatcaccatcacccagaatccatagtttacgtaagggttcgctcttggtgttgtgcattctacgagtttagatcaatgcataatggcatgtatccacctacaaagcagtgtatagaatcctacaaagcagtgtcactgccctgaaactcctctgtgctctgcctgtcatcccttcctcccctcaacccctgataaccactggtcttttcactgtctttacaattttgccttttccagaatgtcacacagttggaatgatacagtatgtaaagcatgtaaaacacaaaacaataaactccttgaagataacataggagaaaatctagatggcctaggatttggtgaggactttttagatccaacaccaaaggcacattccgtgaaagagagaaatgataagctggacttaattaaaattaaaaatttctcctctgtgaaagacactgccaagagaatgaaaagacaagccacagactgggaggaaatatttgcaaaggatattatctgaaaaaggcctgctatccaaagtgtacaagaacacttaaaactcaacaatcacagaataaacaatccagcttaaaaatgggccaaagaccttagcagacaccttaccaaagaagacagagatggcaaatacctatgtcatatgtcctatgtcctatgtcatatgtcattagggagatacaacttagagcaacactgagatgccaccacacatctattagcatggctgaaattgagatcactgacaacactaaatgctggcaaggatgtggagtaacaggaactttcattcattgttggtagaaatgcaaaatggaacagccactttggaagacaatttgggggtttcttataaaactaaatatactcttaccatgccatcctgcagtctcactcctagatatacccaagagaagagaaaacttatgtctacataaaaactcccacgtggatatgtgtaataggtttattaataattgccaaaactttgaagcaaccaagtcatccttcagtagttcaacggatgaataaactggttcatccagactatggaatattgttcagagctaaaaagaaatgagctatcagccataaaaaaggcctggagaaaacttaaatgtatgttactaattggggtgggggaagccagtgtaaaagggctacatgctgtatgattctaacttaaacctttaaatttgttataacattattttctaaagtgtcatggcccattgggaatttcactccccatggtctgaggtagtgggattgtaatccggcagcattgctaatttttctactaattttacaggctttgccacactgtgactgtcaggaggttcttacttgcagaaggagatgcttcaggtacatgtttgtaccagagcattagtaaggctgcatcacagagtgagatgtgcatatcttcaggctctaaagacttaagggaagttcttcgaagctgacagtgaggcctttatgctttcaccatacgtataaaatcagtgtttctggattggaccccaaaaattcattagttctctgctctcagacaagacacttctcccagtggagcttgtttttcactgcctatggagagacaggtgaacaaaatgattccgtgtcttgacctatgacctctgtatcagagaatgactcagtagctactgtgaataaataaacccctaaatccaaagggctcaacacagcagaagttcatttttcttatcaagtccaatcagtggtaatgatggcagtgagaagtttgcttcaagcaaacttgaagcaaacttgttcagtgacttggcttctctctctgttgtgattttaccctcttctagagcagttctggccagtagaatattctatggtgatggaaatgttctatatttccttgtccaatacaatagccactaaagatgtatggctatgaagcacttgaaatgtggcctgtgcaatggcagaactgaatttttaattttatttaattttttaaagaagaaaaacattgaagaacctttattatctcatttcaggacttactttatggtatttaaattagggaaagtaattaagacagttctattagcttatgaatcaatggaacaaacagaatagagtccagaagtgaatatatatgtgtatagatatatatatgtatatatataaaaaatatatatgtatattcaaaatgtatactgaatatatctggaatgtgtataagtatataattgaatatatatggaatttgattacattaaaatatatatattcaattgatctttggaaagatcaattgatcaattgattatttgatcaatttaatcaatagtcttcaactgatctcttggaaaaagatcaattaaagacgatttctcccactacccatttaccttgtcaaggccaaggtggatggatggtggagaaaatccttttcaacaaacagtggtagaacaactggatatctgtatgaaataaaaatggagagatagatttaagaggaactataactatgccacattggtgtatgttatttttgtcaaactgattactgaagtgagaagcatcggctgcaactttaagaggaaggaacaggggcctggaaacattaaataaaaacacaataatcacatagcaaggaaatgccaaaggcaagattgaaatccagttatctgtcatccaaaagttgccccatgatggtatgggagacttgcaggagaaaggtaaagagatgaataagtgaagggcgacaggttgtaagttagacagcaactgaggtctctcactgccccttgtctctctatatatgtattttgggtctcatctaacttcaatttcacattttatttttatttcattgggttggggaagggaagaaatcaagagtacttgggactgtgatagttctttgtctctcatttttatttcatttaaattaattcaaatttaaatagcaacatatgattagtggctattagtagctagagccttggcgccctttctattcagctggcaggtaaggaaggatgatcacagggtaggtttttaaagggccagtctgagaagtggtgcacttcacttccttttcctttcctctggctaacaccgagtcacatgaccacacctcactgcaaaggaggctgggaaatgtagtctagctgtgtgctcagaaagatgaaggaacagattttggtgagcacatagcaatatttatgactccaggattgaaatttcaatgaagactgaaatgtgcaccacttccttttgaagcagctacagaaagcaacaggcaaatccaccaaaagtagttacataagaacagcatagatgccaaactagttaaaatgcctaattacaaatgtttattatcaccagcagtaacaagactaagatcagagatgtgtatgctcaactatgtatattcacccaacatctgtcacatgcctacttggtatcagatactatgccagacacaggggatgccatgatggacaagatattatctgcaaaatataattttaatttaacatggcaggtgtagcattagaggtaagggtaaagtgcaatgaaaactcaagaaaaggatgctgaattcttttggtggtggatagaaagccaatttgggccagggtttccaatagatatgtgcatgtgtatgagtgcagtgatacacataccttgaaagacacttttttgagacacaggagtgtcaaggaataggtggtggggtgtcttcaaatcaaagtcaacagaaaacacatgtcataactccaacatggatgtgcagttctccttatgtcaaattggtggctgacctaaatccactcccggcctcagccatgtgcccgaggtcatcagatacactccacattccttccacagcatcaccacgatatcatctgaaggttagctgggcacattgaatagaaaccactgtctctcctccaacctcccttggagttccttcttcacctcccctctcctgtaatgctttctcttcttccatgtttggtggtaagttatttacatgtctactccctaacacaaaatggtggcctgtcgctgggcttcagtgtccatgagtttattatcttagcattaacacggtatctggcccactaaatatggtgcacttcctggtggcttggtgactcataatcccttcaccttactttcaataatagcatcctaatgtgcttctgaaaggtgaaaggtttacctcgccctctgtcttgggtcttgtaagactgcaagccaaggtgtcaagaatgggacctttgcaaccagcctctcttcagccccaggactttgaatctggagtacagtgacatgaggtcaggaagtggttggagctcatggtcccctgacagtgtacgtggttgagtttgcctggaccccagctataccttggttgcagtctattttaagccagggtctttacccttcccatccattctttgagcctcatagagatttcccatgaattttcttcatctatagctagactgtaagaattccaatttgtagaatgtacatctgtaagtgcatatggaacatgttactaatgaacgtcacagaagactaaatgtaaaatccctctttatgggctagtagaatctgttttacacagaagcaaaatgaaacacatccagtatatattggagtccacaatgggaatggggtcagtcaaacgcatgtgaccagatgttattttcaatatgcttgaagatattttcacttgactcttgagatgaaaagagacaagtaggactgagacttggtacacacttcacaaccttcctagacttggaaaaactttcaaaggctctagagtaaagtcaaggttcccatcttcctgttccccagtactaatcagaatggattcctccttccttcaggacctcctgtccctctccagctgccatgctctcaggaatatttcacccttaaatgtttctccctctggactggagcttcagcttcagtttcttttctgtatcttctacggggcttagcacagggacttccttcataggaggtactcggaaaatatttgctgaattgaatggagttaatttgaattattgaatccaggtaagtggccttggtaagtccattagctttgccctgggaatctcgtctcttgtccttctccatttctattttgccatataaacatgacagagagtgattcagtagtcttccctattcacttcagagggttagaaatgagatgtgaaaatgacagcaagaagacatgtcaataatacccatgtggggtcagcgagtctcccgctgcctgcccaacctttgcaagaagaaagccatcaaggccacttgagtggatctcacacaattcccttgactcaagatgaccatgaggctcaggaggttggcagctaggatttctgttgagagggcattagagattccatgtccctgtcacactgatggaagccctgtttctcttggacatctgagcctgtagatttttcctctgctcatctcatggagcagaatttgtttttggtgtacacttaaaatattagggtcagctaataaaataataagaatcaaaggtttaccaactcataaaatattaagtctttaaggcttatctgacactgtagagccctctgtatttgtggggcctcatgtgtataccttctcccaggtaggtctgtgaatgatggactctaattttagttcttataacgtgtgtgtgtgtgtgtgtgtgtgtgtgtgtgtgtgtgacagagagagggagaactaaatacattatgtacatctgaaaagtcaccaaagacaagaaaaaaaaagtaggtatatatttagctaagtgttctgtggattttttttccttttgaaaaactccagtacaagtgttcaagccaagtagaagcctttcactccagttatttatttattttgctctctcctttggaaagcgatgcacatgtattatgaaaagcaaatattatactctttattgtcaaacaaagtttataaggttcgtgtgtcaatgatggggccaaggacctcacacagaaagtttcctgtcctggaagaatttttcatggaagataaaatatggaaagtggggggaatgctgactgccagcaaatagaatcctcccactcctaatggcacccgtggggttggatgagctcaggccttgactgtcctagctggagcgggggtgggggtgatgggggttcttccctatagactagcatgggccactcagtgaggggaaggaccacagtggaagttgaagggtgtttactcagaggaggctacttgcgtccaactccttgcagctctaacatccagatgcactcggcaaccaggcctttggacacaggaagtagaagcaaggtgatgaaaaatgaaaggcattctttggccttggagcacacaggcatggaatccggtaggagtacagttactatttacaggaaactggcacggagatataacttttgctagacaggttggtgccattgtgttctggcaccatgaaaagcattaaataaggtttaccatttgtctaaaccatgctgtatgcactctactttctgatatgtattgctttctccaactgggagtttcactaaagtccctccctagggagtagagagcgggagttatagtcaaccatggttaatttgtgctttgtgctttgtttatccaaaccatatgtctagatggttgtaattctgtgtcattggctgtgtaatgctctctgtgctaagatatctgtaaatagcaacagctcaatgcataatcacgttggtattctgaagggggaaaaggaagtttcaagtgacgtttgctgtgaagacaaccactccaatgatgtctccatacatgtctcccaggacataatctcttaagtattaatcatgcagacctatgtggatggcacaggacctcacagaagccagacgtggtgggtcaatgctacctccaattctaatactctagccttagggcttgaggacactctagatattaaatcatatcattgctattcagcagccccagtaagtagtttgtgtaccaaagagaaatccttttatgttggtgctagaaaaaattaaaaacaataaaacaaggggaatccaccaaaattttcttttataatattttcatttaaaaactttatttgattcaccagctttctatcaagaaaagacattgtgctcaagagctggaggtgataaagtccaatgtgaatttcttaaatggcaaattaccagccaggatgaacacacaaaggcttcagcttttatgtacggcctagaagccccagggcccctgttccccctgagcacccaagagcagcttctgaacactgcaatgtgctggctggaggcctctggagaagaggaggccagacctgtgaattatggcaaattctactgcaccctgacttcagcaacctcctaaatcagaaaagggggcattaaaaatgtttttccttcatgcaaatgctgccattcatttagaagtgaggccatgttacttcaggtgcccatagagcatgatcatttgagcatcccgaatggcattataggaagcctggccccagagtcagcctcagacggtggagatgtgacaatctctttgaagtcccagggaatgaaaggagtggtctgcaaacaagcctagggggataagctgaatatatttcccccagccttggcagagacgctgcaatccatagctggctcacattgccacacacatctcagcctgtcacattgcccaacagtcttggtgcatttcgttcaccaacccttttaccacagcaacatgttcaacgcatcttatggcctcaaaccccaatcttggcatacagccttgtcctgcactttatggaaaaatgagaagccatcgtataggaacaggagcatctctttcttgcatgacagaatctatcggcccatctgcacctccccatcctcccccaccttccttcagttacaaaggtgaagttcgcccttctccttcctgaggggccttttccctcctgccttctgacagtttccatcaacagatatctattcctttgcttacagtttccactagtctcccagtcttaaaattcatttcctttgctctcactcattttcctcctgctgttgccttatctccttacccttcccaatctggcttaaaagcggtgtgtcagctgggcacggtggctcatgcccgtaaccccagcactttgggaagccaaggtaggtggattgcttgaggacaggggtttgagaccatcctggctaacatggtgaaaccctgcctttactaaaaatacaaaaatgagcagggtgtgttaatgggcacctgtaatcccagctacttgggaagctgaggcaggagaatcactggaatcgggagatggaggttgcagtgagccaacctcatgccactgcacttcaccctgggcaacagagcaagactccatcttaaaaaaaaaaaaaaagcaatgtgtccatatgatgctgtccccaattcctcacctcctttcaatcttcaacccactctttcgactccttcaattccacttcttcccataccatttgatatggtttctgtgtccccacccaaatctcatcttgaattgtagctcctataattcccacgtgttgtgggagggaaccagtaggagataactgaatcataagggtggtttcccccacactgttctcatggtagtgaacaagtctcacaagatctgattgtttcataaggggtttcctcttttgcttggttctcattttctctttgcctgccactatgtaaggtgtgccttttgccttttgccatgattgtgaggcctccccagccacatggaactgtgaatccattaaacaactttttgtttgtagattacccagtctcaggtatgtctttatcagcagcgtgaaaatggactaatacaccattccatcagaacttccctgctaaccgctctaaatcctatattccattcttgccttccatctgagcaccaaccacaagtcaacatctctacttgaacaccctgtgttcaagacataaggtgaccatatgtcttcatttgctctgggaagtctctatttacatgtggtgtcctggcataagtagtcacagcacccctttcagactcaaaaacatcttagacaataaattttaaggtcacatatattagcagatataggcatctgtgatttgtctgtccaatctgtttatttccttattttcattttttgcttttagagaactatcccttgcagatactttttcttttttctttttcttctctttctttctttctttctttttttttttttttttttgagatggaatttctctttgtcatccaggctggagtgcagtggtgccatctcggcttactgcaacctcagccttccaggttcaagcgattcttgtgcctcagcctctcaagtagctgggactacaggcctgtgccaccatgcctggataactttttgtatttttagtagatatggggtttcactatgttgcccaggctggtctcgaacccctgacctcaagccacccacccgtctcagcctcccagagtgctgggattacaggaatgagccaccacgcctagcccaaataccttttcaaaattgtctggtcatatgacagatctacccagaatcagattggtataaagagagttactgagtcaaaagtgggtcaagaccattcacacccaacaaattttgctgacacaatttgaggaggaaaaaaaccctattttctcactggaattgctatgctggtagaatagaatagaagcctgaagagactgggccaactctgccaccaaacttagggagagcctgctagaagagaaaggcagcacagtgaaagcacagcttacagcaacagaagggggaagaaagagaggatgggagggaagaagagagagatccctaatgccaatgttgaacaccaggggctgaaaatctgttccacctgtgggctttatattgcgtaccccaaaactcttctttttcactcagtaaagttggaggtaggtttctctcacttaatgacaagacatccaggatctacacaagcatgccttgaactcagctccaggcagtcctatccctgctgtccccaaatctattcctactccacctttcaaatctcagcaaccatccagtttcttctgccagaaaccttggaatcatcttggacatcttcccttctctagcgccatcatgaaatcttattggtttatttttatgaccaacatatgtgtaaactctggttccttccctccatccacacggacccccaacaagtccataaaaccatcatcttacctgggcaactcaacagcctcccagtgggtcttcccatggccattctcactcctaacattctccgtggaacatctagagtcatcttcttaaacttcaaatctgcttatggtgcacaaggccatgcttcactggggagctgcaaggagagtagagggagcattgccaagttaagttaagagcttcaagacattattgaagctcttgtaattcctgaattcaccaatacaaattctatttcaggctgggtgtggtggctcacacctgtaatcccagcacttctggaggtcaaggtgggcagattgcttgagcccaggagttcaagaccagcttgggcaacatagtgaaaccctatgtctacaaaaattacaaaatttagctaggcatggtggtgtgtgcctgcagtcccagctactccagaggctgaggggggaggatcacatgagccccggaggcagaggttatggtgagttgagatcacaccactgtactccagcctgagtgacagagtgaaaccctgtctaaaaaaaaaaaaaaaaaaattattagagacaatattagcatggttcccaagaatatgtgtcttatttttcaatcattatttgctttattgtgtttcaatcagaagcttagggtcaaactttcttccttgagctgggatatttgaacactgaaggttactagcaccttcccatggacagattgcagagagtggtgttcagattttaaataaaaatctctaccaatgctgccaggatgttaagcagagcctgcacagaaggattgtacatgggtcagtgactgcagggtcatttgtagaccctggtatttgaagtttcctacagaaccttcctggaagtgagtgttctcaaaggaggggcatgcactacctcgccactctaatcttagatcctaacctctctccatctcctccttcctcaaaacagacctgtgggttccaaatttgattgaaactgagtccagtaatattagtcctacctgactgggatgctgtcctgacccagtggttttagaagggagttttatagaagaagatatgagaagggtaaaattagaggggtgcatgcatgttcctgaaagagaagactaaacattgtaagggggccattgcctcaatttgtgtataagtctattataattccaatccaaattttaataaagttttctttgaaacctgacaaaatgattctaaatgttgtctggaagaataaatgaataaaataatcaagtaaagtttgaccaaacagaaagattagaaacatttgcaaggacattaagatagattctaaaactacgacaattaaaatagaatgttattggaccaaggatgggcaggtagaaagaacattaagaatctattccataataggagagctttttcaagtctctgggggaaatgatgcggggacaactgcgaaacactaaagataaattgattcatcactgcttcacaccacatcctaaaataaatgtcaagcggattataaatttaaaaatacatatacaaatgaactagaaggaaatataggtgcatgtttatctgatcttgtaatgggaaaatcttttaggtagtgtattaccataaagtagaatcttgatgaaattgatcacatgtaaattcaaatattctgccataactatatctaagagcaaataggaaactggaaaaagaaacttgcaatgtatgtaacaaagggtttacattcttaagtctctgaaatgtcaatgtggacaaaagacatgattagaaaattcacaaaggaagtactaacagcaaaaatatgaaaaatgtttaactttgcaagctgtcaaagatgtgcaaactgaaacaatagtgaaacacgatttttcagctattacactgacattttctaaaaaagaaaagattatgtagagcctgggaaaatgggcacccacagattgctaggatgatcctaaagtgatacaattgttctagagggtaacttggcaaaattctttaaaatatgtgtagttcatttacccagcaattcctcttctaggaatttatcctcagaaaataatcataaataactgcagaaatttatttaaaaatgttccctggaaggttgtttataaaagcaaaaaattaaaaacaaaataaacgtctgaaaatatgcagctgcttaaataaagtatggtgcattataatccaaggtcataaaaaaatcatactgagaattatgtagtgacttcagaaaaggttcacaatatatagttaaatggggaaaaaagttgcaaacccatctgtacatttcatttttttgtttttaaaaaatgtatgtatgtaaatatatgcatagaaaaagactttaagaggataaccaaaaagttatcagtgattatctctgggcggcaaaagtgttggtgattttcattattcctcaaatattctgcaataaaaatgtattactttttgtaacaagattcttaaaaacattaacttttatttaaatcctgcagagaagtcaggtatcaaaaaatggtcttcaggaagctttttcggggaaattcttacagccaaaaactggggaattgctggggaaagtggtcagacctaaatgcagctgagctaggagaagacaacccacctctcagggccacggtcctggagtcagcagccccatcactacccctgcttcccatcactgctttttttttttttttttttttttttgagacggagtcttgctctgttgcccaggctggagtgcagtggcccaatctcggctcactgcaagctccgcctcccgggttcatgccattctcctgcctcagcctcccaagtagctgggtctacaggctcctgccaccacgcgcggctaatttttttttgtatttttagtagagacggggtttcaccttgttagccaggatggtctccatctcctgacctcgtgatcctccagcctcggcctcccaaagtgctgggattacaggcatgagccaccgccgctggcccccatcactgcttgttttatgagtcatgggatggaaaagtgatatggactaaaaataataataatgaggatgatcacaataataatgcagatgataatatattaatagaaaactgacatttattaagcacttggtattttccagaccccaagctaagtgctatacagatagcatctcatttaaagctcacaacaatccattggcaaaaggattattgcctgggattcatagagaaagaaaactgagaccaggatggtggcacgatgatgtgattctcccacactttcagctctcaggaggccgagcggaattacaaacatacctgagtctgatgccaaagcccctggctgatctacattgattaggtgcttacaggagcatttttccaaacccacatgccccgatcccgacttcaccacccaggcctcaatttcctttgtgattcagcctcgtattatgtagcctgactccactgtgaaagatttgtggcagttgcatgatgtatgaggtgccatttgtaaaaatattatttagtgtaaaacatgatgttttttctcctgatttacaagttggatttataaatctgcacttctcactatctgagttatatatcttgcctctgatttataaaacttgcctgtaaatcttcccagcaaagttttgattcagaaatcattattttaagaattagatttagttaaaacattcagctgctttataggggaggaaatggatttacataactccaaccggagcttacggatcctatagcagcttcacaagtcgtgcctaggaattcctaaggaaaatgttttgatttaagggcattcacttcacactttagctacacctgactgatttatatcaccaaagccatacaatgatgatccattttataaaaatcccacttttctttaattccagaccctgatttatatgccctgattgggtatctgtaatgctctcagtcacaggctcctctgccctagagctggtcttggggaaaaggcctaagaatcagggatggtcagaataaagggaaatttcacctccttcttggtttatctcccttattccaagggagccaaagcaggttgcctcctgcccctgagctagagccagctaaccctgggggagcgtctgtaagatgccacagccttctccaagaatgtggtgggttctctccatccctgctgctcaaatgaagagcggattgctcccaagtagaagaaatcgccagtccagagaatcgaggacatgtttgatgagtaattgctggctgaaaaaaaagtcaatgaataaatgaacgctttttaaagagcagaggccaacaagcagtgatctgacaaatagtataaatgaacgaaaagggagggtgtgtgagagccttgtgagaggctgctccaatctgaacagggtggctgtagctcagctccacctggctgtggttaagtaggattacttgcccagtattcccacatgtggctttccaaggcaatcctgaaattcaaatgtttattttaaatgacttattttaaaaatcaacattgtgcaggtttagtttaaaatagcaaaatacacacattttaaatgtacaggtcaatggcatttgaacaaagtacacactcatgcaaccaccaccctgagcaagacatagaatgtttccatctttccagaaatcatcctcttgcctcttaaagtcagtgacctccatcctaccccctgctccagttaaccgctggcctcatttctatctctacagatatgtatttttttctgttttaatataattggaacttaatataaattgaatcatacagaatgcatttgtttcctgtcctgtttctttcacttagcacgcctgtgagtgagattcatccatgcacgtatccagcatttgttcctttttatggctgagtagtattccgtggtctaaatgtattatagttgttgattcatttccagttggtggacatttgagttctttccagacttaaaactattatgaataaagctgctaggaacattcctggaccagtctctttatggacatatgttttcatttctcttgggtaaaaacagaggaatggagttgctgagtcatttggtgagtgtatgcttaactttccataaagccgccagacagttttcaaaagtgattttgccattttacactccctcccctccccagtaatatatgaaagttccagttgctcaacatccttaacaatgcttggtcttgtcagtctgtttaattttagtcttttagtcagtttagtcataatttaagtcatttagatataaagtggtattccattttaatctgcattttcccaataactaatggcactgagcatcatttcattcactcattggccaattgtgtatcttcttttgtgaaatgcctattcagaacttctcttatttattagttgtttgccttctattattcagttgtaagagaactttgtagactctggatactagtctttgccagatatgtgcattgcaaatactgtctcccagtctgtggtttgttatgtctttttcttgtcaatgtcttcggcagggcaagcaattttaatttgatgatgtacaactggtcatttttcttctttagttagtgctttttgtgttcctagaaatatttgtctacccctaaattgcagtttttctgctatgctacctcctagaagttctacagttgaaggcattatgctccgaacctacgactcatttcaaattaattcttcaaaacaacgtgagcaaaggattgaggttcattttttttctacacagacacctagttcttgtagcaccatagaaatcaggaagtgtgagtcctccaatttcgttctttttaaagattgtttcagctatgttaggtctcttgcattttcagatcagtttagggtaactttgttaattcctaccaaaaaaaaaaaaaaaagcctgctgagattttgtttggaattttgttgaatctataagtcagtttgggtacaaagaacatcttaacactatctagtcttcccatccactaacaggacatgtctttcagttaatttagctcttccttaatttctttcaaaaatgttttatagctttccatgtagaaatcttgcacagctttcatcaaattaactcccttctcattttgaaattttattttctaaatacttgttgttcataataattaacttcatatattcatcttgtattctgtgacgttgctaaattcatttttagctctagtagtttttttcataaaatccttaggattttctatacggataatgataacatttgttaatacatttttatttcttcttttttaaatatttctctcctttttaaattcgtttgtttatttattttgccttatggcattggctaggacatccagtacagtatttatgggaagtaaggagactgaacatctttgtcttattcccagtcttagggggaaagcattctggctttaaccattaacaatgatggttgctgtatgattttcatagatgcccacgatcaggttgagaaggtttccttctatttgcaatttgctgcgtgtttttcatcatgaacaagttttggatttcatcaaactcttttgctgcatctatctactgggattattatatgatttttctactttattctataatatgtgaaattgctttgatttaatttttccatgttggaacatctttgcaatactgagatgcagtcttcatatagtgctgaattcagtttgctaatattttgttgaggattttgctttgtgtgttcataagagatattgacctgtaatttcctttccttccaactgcattgtcggcttttgatatcaggattgtgctagcctaataacatatgttaggaagcagtcacgcctatatttttggaaaaagtctgtgtaatattgatgttatttcttttgtaaatctgtgatagcattcattggtgaactcatcacaacaccgaatttcttgtatgggaagtttttttatgataaattcaattattttatgtttttccagctttactgtggtatacgttacaaataaaaattacatatatttaaagtatacaatgtgatgttttgagctatgtatatatcatgaaatgatccccacaaccaaactaattaacatacccttcacctcgcacaataaaatatttttcatgtgtggtgaaaacacctaagattaattctcttagcaaatttcaagtgtatgatacagattaatctactattgtcaccatgctgtacattagctctccaggacttatgtatcccaaataactgagcctttgtgggctgtgaccaacatttccccatttccccccaaccccaacccctgataggcaccattctactctctgttcctacgagttcaactgttttaggttccacatataagtgagatcatgcagtatctgcctgtctgtctctacctgacttatatcacttaacataatgtgctccaggttcatccatgttgtcacaaatgatagaacttcctccaatgtgtgtatgtgtgtgtgtgtgtgtgtatcacattttctttccttctcttttttctttcttttttctttctttctttctttcctctttctttctttcctctttctttctttctttctatttctttctatttctttcttctttctttctttcttctcctcttcttcttttttttttttttttttttttttaatttgagacagaatctcactctgtcgcccaggctggagtgcagtggcacgatctctactcactgcaaccacggcctcctgggtttgaacaattctcatgcatgcctcagcctccaaagtatctgggattacaggaatgcaccaacacacctggctaattttttgtatatttagttgcaaaggggtttcaccatgttggccaggctggtctccagtgatccacccacctcagcttcccaaagggctggaattacaggtgagagctaccgtgcccagccacgtatttgttattcattcatgtgtcaacgtatgtatgcttaggatgatttcatatcttggctattgtgaataatgctacatgggggtgcagatatctcttcaagatactgatttcatttcctttggatctatatccagaagtgagacagctaggtcatgcgacaggtctattttagtttctagttatttttagttttttgaggaaactctgcactgttttccacaatggctgtaccatttacattcacaccaacggtgtacaaaagttactttttctccatatcctcatcaacatttgtcatcttttgtctttttgacaacagccattgtaacaaagtgtcaggtgatatctcattgtggttttagtttgcatttccctgatgattagagacactgagcaccttttcatacacctgttggccctttgtatgtcttctttggagacatgtccatttaggtccttagttcatttttaatcaggtatttggtctttattgttaaattgttcgagttcttttaaaattttggatattaatcttttatcagatatacagtttgcaaatattttcttccattcccttaggagtgtcctttcactctgtttatttttttcctttgctgtaatgaaatcggacccttatctcacaccatacacaaaaataaactaaaaatgaattaaagactcaactgtaagacctgaaactatgaaactcctggaagaaaacatagggaaaaaccttcttgtcattgatctgggcaataagttcttggctatgacaccaaaagcacagggaatgaagggcaagtaataggtagaattgagtcaagcaaaaagcttttgtacagcaaaagaaacaatcaacaggctgggcgtggtggctcaggcctgtaatcccagcactttgggaggccaaggtgggaggatcacctgagctcaggagtttgagaccagcctggccaacacggtgaaaccccgtctctactaaaaatacaaatattagccgggcgaggtggcacatgcctctaatcccagctacttgggaggctgaggcaggagaatcgcttgaacccgggagcagaggctgcagtgcacagagatcatgccactgcactccagactgggagacagagcgaaactccgtctaagaaaaaacaaacaaacaaaaaacaatcaacagagtgaaaaggcaattctttcaatacattggagactgttcaattttttattgccccttgattcagttttggaatacactagttttaaagtaatttgtctctttcacctaaactgttaaacttatcaggctgaagttgattgcaatatgtccttatgataatattcctcattatttcttactattattattgcttcttattattctttaaaatatgcatatattttaaattcttctaaatatgtattaacattctacaggatatgtattaatatccccacttgcacctctaatactgtttatttgttttctttattttttcattaatttgtcttcctagagatttactaattttattaagtttgttttcaaagaaccaacttacggctttgttaattttccccatgtgaatgtttaccattcattgatgtttgttcttatttatattaattctgtcctctctttgctttgagcttattttctttttctgtctataaaatagaaacatcaataattggtattaaacctttttcttttctaaaatagatattgcaagctatacattcttttcgaagtattgctttagctgtacactgcacccaacaaagtttgaaatgttaaattttcatcttcatttgcttcaaatattttaaatttatcttgtaattttcactggcttctgagttattgaaaaagcttgttttattccaaaatgtttagagattttctagatatgtcatttatattgatttctaatttaacgccatgtggtcagaaaacaactctatctgactgcaatgttattaattttgctgatatttattttatgactagaatattagctattttggtgaccattccatgtgcatttgaaaataatacatattctgcaggtgtttgtggtagttctataatgtcaattatataaaaattgtggatattgttatattaatctttgacatcttcatctatggtttgtatatttttattaattaccaaaagagaaatgttaaaatttttctatcattgtggctttgtccatttttccctttatttctgttaatgtttccttcgtgaattttttttttttttttttgagacagactcttgctctgtcacccggactgcagagcaatggcacaatcttggttcactgcaacctccacctcccaggttcaagcgattctcttgcctctgcctcctgagtagctgggattacaggcactcaccactacacctggctaatttttgcatttttagtagacatggggtttcaccatgttggccaggctggtcttgaactcctgacctcgagtgatctgcctaccttggcctcccaaattgctgggattacaggcgtgagccattgtgcccggctatgaattttgatgccctatgataaacggtatacatatttaaaattgttctaccttgctagtgaattgttcctttaatcattgtctaatgcccgtatttatctcttactctttgtcttgaaatccaccttctctaatacccatatagccacgccagctttcttactcttattgtttgcattgcatgttttatccatcttttacagtcaatgtcttgttatttatttttaaaatgtgtctcctacagatagcatcgagttggatctcactttttttcctagtcaaaaatctctattttcattgggatgcttagtatatctgcattttattatttgatgagttgaggtttaagttcatcttataatttgatttccacttccctagcatgttttataaaattatttctattgcttatttcctgtattctttgataaatattttagatatctaatacatcttctcttttttgtacttaatttttgtgtgcttgatgtagggctactaaaatgtgttttttaaattatcagtctatttatagtcaatattatacctcttcacatttcacacttcccttctgatactttatacttcctgttttacaataaatatttttcccaggatatgatttttttacctccttatatccttcctacaattgctatcctattttttacttatctatatatgttaaaggtcactctacagtgttattatttatgtgataagtaattagttttattatgagtaatttaaataaattatgagaataaaagggaggcttttatatttacagactcatttccaatttctgatgccctttattttttacacagattctaaattttcatttgctgttatttctttcagcctgaatgatactattcactatttcttttttgcaagaatcctagtaataaacttcctaactttctttgtctgaaattatcttgatttcattctcactttcagaagctatttttgctggatatagaaatctaaattgacaggatttttttttcatttacactttatttttattcttattttttggagacagagtactgttctgtcagactaaagtgcagtggtgcaatcatagctcactacagcctcgacattctgggctcaagtggtcctgcctcaacctctcaagtagctggagactacaggcatgtgacaacatgcccagctaattaaaaaaaaacaaattgtggagatgggatctcactatgttgtctaggtttgtcttggactcctgagttcaagtgattctcctaccatggcctcccaaacacttgcacttttaaaatgtaattaaattgacttttaatagccttcattgtttgatatgaaaagtcaacagtaagttatttttatccttttgtttcatgtctgtaatgcgtgtttccagtatggcgctttcagtattttctttgcaatttgactctgattatttattttacatttatcttgcttggaattgacttagatttttggttttgtttttaatctgaaaatttttttcttgtttttcattcaatttgttaagtttttagtcattgtttttctaaatgctggtgtgctccttacaattgttttctgagactcaaatttcaggtatgtaaaagcagtagttctcatattttttggtcccaatacttctttacattatgtaaaattttcaagcaccacgaaagcatttgtttatgtagttatatctatcaatatttatattagaaagtaaagcagacaaattgttaaaaatatgtattttgacacacataaaaacaaaaataccataacacattaaaataaaaaagatagacttattgaaaaaaatcaaaaattcttcgtgagaagaatgacactttcacagagtgctttttatggcttaatagaagacagctacagtctcatatttgtttccgcatttaatctgttgttatatcattcatcttgcagtctatggaaaactccactttacacctatgaaaagatggacgtgagaaaggcaaataatatcttagttatcataaatatagctttagtagtacagattttatgaaataatcttggggacactcacactttgaaaactgttattaagcaattaaatattttcacacaggtccataaggttctgtttattttttttaattctttttttccgtatatgttattgaaaaatgctattgatttataaacaagatccttctttctctgcccagttataatcttctgttaggttcatctggtaatttttttaaagtttcagttattataattttctgttactgaatttccattcggttgattttttgtatagtttacatttttctgctcagattctttttctattcaatcattaggaccatatttttctttaattctttgaaaatattatacttgttttaaagtctttgctagctccatcataggagtcatcttacatttagtttcttgattatattttctttatccctgaatcacattttcatgtttttatttttgtatgcctaagtgatatttgattgaacactgcacaccacagattatatgtggtagagaatgtggattctgttatcttttcataggaatgtgtgcacatgtttattaggcagttcagttgcttgcacatcgtctagtaggcttggttttatgttttttaaataataaatggaaagtccaaggtatttcccaagcccctctaatttgacaggactcaaactgcaaactcttgttggggcttcaatttggactctgttgggacaaattaagaatagttcttataccttagacacaattttctgttgtcttgaaagatgctgagatgttaaccatatgctcaagagatctcttcactctaataaggttgagaatcaagcatccagccccaccacactgcctgtcctccgtcactgtcaaagctttagtctctctgctctactttcaatctcccaacagcttaactctggtaagcactaggtaatctccatgcacgtgcagtctggttctcagccatggacttgcagggaaccacctacacacctccctttctctgatgcgccattgtgcagactgcagccatttgaagtgactcaaactctgacctcattctcctcagctcagcatgcccaccatcctctgcccagatatcagcttgctctgctgtgattgtgctactattacaaccccggcaggggactgaatgaccagaaatctcctcacatgagcttcccttctctctgaaatcactgctttgtgttatctaattgttattgccccaaatcagttgtcatacgttgtgtctagttttatagttctttatgacaagagaaccaactgagctattccgtaaacctgtgaggttcactgggcccacatacctcactctgatcaggcaatctgccctgtcataccatcttcacttgatgcctagtagacaattattcaagggatgtaaactatatagataattaagtgggtaatttcatttcctcagtggatttttaggcatatttttgaaatgcatacttctctacttagccagtgactttcctctcacatatggcagccctggtctttgaatcttcacttaaaatttgtcccttccagaagacagctttagtattagtcagggttcttcagagggacagaaccaataggatgcatagatagataagtgagaggctatttattaagggaattggctcacatgattatggaggctgagaagtcctacaacaggccatatgcaagctggagacccagggatgcctgcagcatggctcagtccaagtccaaaagcctcagaaccagagaagccagaggtgtagcttgaagtctgaggccaaaggcctgaaaacctggggcaggggttgctgctacacatcctagagtacaaaggcctgagaatctggagttctgatgtccaaaggcagcagaagatgggtgcctcggttctacgtgagagaacctggagttctgatgtccaaaggcagcagcagatgggtgtctcaggtctagaaaacagaatctggagttctgatgtccaaaggcatcagaagatgggtgtctcagttctacgagagagaacctggagttctgatgtccaaaggcagcagcagatgtatgtctgaggtctaggagagataatctggaactctgatgtccaaaagcatcagaagatgggcgtctcagttctaacagagagaacctggagttctgatgtccacaggcagcagcagatgggtgtctcagttctaggagagagaacctggagctctgatgtccaaagtcagcggaagatgggtgccttagttctaggggagagaaagcacaaactcaactttcctctgcctttttgttctatttgggaccccagcagattggatggtgcctgcttacattgagggtagatcttcccatctcagtccaccaattcaccctccaatctcctccagaaatacactcacagatgcacccagaaataatgctctatcagctatctagatatcctttaatccagtcaagttgatgcctaaaattaaccatcacaccctcctaaaccaacctgtctgaagccttcaatgaaaggaaagatgcacatatatctgtagctataactactgactgtttatatggattaagagaagtatagtacttcatacctgtcattgatggattttttttctccactgcacttagaagaactacaaccccaaattccttagtctgaccttggcacaattccatgcttggtccctagtcatttctaatccatgttggtaactcaacctacaattatactgttacacacttacagacttcacttaaaacaagtctgtgggatttttgccatagtcactcctaactatcatccatccactcacccctgtgtagtcagggtcccactgtatcacaccaacccatgcatggtatcctatatcatataatgccctgaactttcccgtgtcagagggaggtgagcccggcaggctggtattatagtggtgaccgccctgccgcctgcatatgggatgagtcctctcaaatagcagaagcagagggggtgggggcagatgcatgtcccaccgacacaggataccatcctcgggggctccgtgcctcccctgccaaggtcagggttgttcagatgatatgggggagcagcggagtggtgttcatcgagctctgggaatgggagctgggtcccctctctgtgaccttaggaagcttatttaacctcactgactctgttttcctcatctgcatttggaaacttgatgtaacaatatcaaatcatgatttctcatgtggaatacacttggaggagggcggtttgcactgtggttgctctaccctgagggtggttatcagcaaggcctttttaaagtagacttgagctttaggtattaagaacctaaaacatgtgcataacttttggcctgggatttctctccatttttaggtctgtgttccaaggaaatgatcagtgatatagttaaatatttgcattcagggatgttatttgaaactttatatataacaatgacagtgtatgatataatttgcatctgtgtctgcacccagatctcatgtcaaattgtaatgcccagtgttggaggtggggcctggtgggaggtgattggatcttgggggcggatttcctccccatgctgctctcttgatagtgagtgagtgagtgctcattagatccggttgtttaaaagtgtgtgcacctccccactctctctcttcctcctgctctggccatgtaagacatgctggcttcccctttgccttccaccatgactgaaagtttcctgaggcctactcagccatgcttcctgtacagcctgaggaactgtgaccaattaaacctctgtcattaaacaagaagctacttttataagaaattttataagaaattctcataaattgcccactctcaggtatttctttacagctgtgagggaacggactactataaagtatatcagtataaaattagcctacatccaaatatggaagattgcccaaattgtgatttatccacataatgggatatgtatacggtcattcaaaatcatttctttttttttaattgagatatggcctggctctgtcccccaggctggagtgcagaggcatgatctcagctcattgctgcctcgacatcccgggttcaagtgatgctcccacttcagcctcccaagtagctgggactacaggcacatgccaccacacttggctaatttttgaaatttttgtagagacaggttttcaccattttgcccaggctggtcttgaactcttgggctcaagacatctgcccacctcagcctcccaaagtgttaggattataggcatgagccactgctccttgcctaaaatcttataaagaaaatttaatatcattggaaaatgcttacaatataaagcagtcaaataaatactctatgtaatttgttatgtatgtataaagtatataggaaaatattcacagtgttattatctctggatgatagtgttgattgttggtgatttattatttttttctttattataatattctatatttttcaattgttgcaagtcagtatacaataaacaaaaatcttacttacgaaaaaatgttggagttaaagtctggggtctggatttgagtccaggccccaacatttgctgtgcaaccttaagtaggagaaagctgaaaaatgggaaaaacttgtctcacccttctcattggataggcaaggaactaaaataagataatgtgcacaggactcatgtggaaggaaaatggcaaaaaagataggggggctattgctcatatgaatctgactaggaaacaagaagctgctcttaaaagaaatattgatgcttacaaggtttcaggtcacccctatctcctccagcctatctttaaaatagacaaaattcaaaacaaaacaacacaaaatctcacgcagaaggttcttctgcctggtaacagaatgcttctgtgtagttaaaacacaagctacatctgacaactgcactatcagatgggagctctggacatgtgaaaatcattgctcctgtactgtaagacctgatagagccctggtcagccaccagccttgcagaggattacatggggtctccatacaaagctggatgcttcaagatagttgcagtctcaagagtgcattccctgcctctgacggagtggtaggggctgttacaacccatcctgtggtgcccaagaagacactcagcattcattgcaggtagtgtggcccccagtgcagccacattggaatccatttgtaatatttatttaactagaaaatataaacgtcctaagtcccaacaatcctacttctctgcagcaactctagggatgtatttgctgatgtgcatgaaatggctgggcattccttttaagtactacatgatattccatagatgaggcatgctaaaatagtattcagacctcagagacttctcttattgttcagcatctcgagttaagctgcaatgaagtgaatcgacatgtcacaacatcaaaagtctccaagagtttgttttttttaaatttaaaaaagtatgttgctaatcagaatatacactatcaaatcatttatataaaaataagtcaaaacactacaattctaatttctgtgggtgtataaggctcagaaaaatgtctggaaagattcataccaaattgatcatattgattagacctgaaggtatgggtgaatgtggaggatacaatctttcttacctgtatttaaaatcatttttaaaaagaatgtgttcatgtattacttgtgcaattcacataaatttgacagtaaaaattaaaatagctgacataaaataattatgaatagtcaacaactgaacaaacaaataaatatactatagtcattcaaagccaggtttctcattgttggagaaaggagtataaaattggaaaggggaggaggagacagaataagccctaaggtgctggattgaaattgaagttataagtaaaaactcatggtttaaaaagggacagaggaagggaggaagggagagagagtgagggaggtcaggggagagaaggagagagataaagaaattgttcatatgcatacgcacagaggacctggaagcaatggaactccaatagcaacgagcatacttagcatggaggcgtttctttctatgtcattctcctctaagagaagacagggccacttacaaaatggtcattgcaggcctgcaaccgagaaagcacaagatgagcctgaaacttctggtcccaaaaagtaaggaaatgctcaaagaataacagggacatatcaaaaggacaaagaagccaatttgcagagactcccactggccaaatatgaggcaaatttagcacaaaaataaataatgattgaaaatcatgatttattgaatgaaataagcattcaccagttacatggatataaataaataaatgaaaaagaaggaaaagctcttccttgcagtagaaagacaattagtaaatgtagaaggaatactataattagaaaaatttcctcttggcaactatcatcatcatccttgaatcaaacaagaatcgtcaacggatattaaaactactgaagggatgtttgaggaataacaggggatatttacatagtcttgaaatatctcccataagacgcttacttatttcaaaggaaaaggacattttcctaagaatggagaaagctggcaacaccactgtcaccaagacatccagattagcaactctaatcatgggacaaagctacatcttgtgccccctgacaggaagaaccaaggagaccaaggcaccattttggtggtatttctgccagaaatgagtaatgcaaacctaatcctcataaaatatcaggatttaaaaaacccaaattgaggacgatccacacagtagccagactccagccctcaaaaacgtcagtgtcatggaacacaaaggaagataaaggcataaaaggaggccaaggagagatgagcaccgaaggcaactcacgatctgtgatttccttccaccactaaggagagtgttaggataatcagccccatcagaacaaaatctgtagatgacgggttatcctatcaatattaacttcctgatttttgtgtattttctaattcctgtgtttatggaagtgcacatcttgtttatgggaaatgcacgctgaagtattcatgggtgaaagagcatcaggtctgcagttaattctccaatggttcagaaaaattaaagtgcgtgtatacacacaattacagtgtgtgtgtgtgtgtgtatgtatgtatgtattagtctgttttcacgctgctgataaagacacatctgagattgggtaatttataaaggaaaagttgtttaatgaactcacagttccacatggctggggaggcctcacaatcatggtggaaggtgaaagctacgtctaacaaggcagcaggtaagagaaaatgagagccaagtgcaagcagaaaccccttataaaaccatcagatctcgtgagacttactcactaccacgagaacagtatgggggaaacctcctgcacgattcacttatctcccactgggtcctgcctgcaacacatgggaattatgggagctacaattcatatgagattgggtggggacacagccaagtcatatcagtgtgatacataaaaagagagaggaagagagaaaagaataaaagctggtaaaatgctaacaattagggaatctgatgaagagaatatgagaattctcgcaacttttctgtaagcctgaaattacaaacttaaaaagaaatggcaagtttaaaggcaaaataaaggggtagacaaaacaacttgcagcaagcaaccagggtctccagccaagatgtcagagtcaacaacctggccaatactgcggagaagctgtgtatacagaatactcaaaactctgggtccaaggccgggagcagtggtccctgcctgtcatcccagcacttgggcccaggagttccagaccagcccaggcaacacagcaagaccttatttctaccaaaaaaaaaaaagtttaaaagactagcaaggcatagtggcttgtgcctgtggtcccagctacttgggaggctgaggagggaggatctcttgagcctgaatggtcgaggctgcagtagccatgatcgcaccactgcactccagcctggagagacagccagaccctgtttgaaaaaaaaaaaaaaagaagaagaaggaaaaagaaaaagaaaaagaaaaatatctggattcaggttcaaatgtcggccaagagaaaggaggacagtaagacctttcaaaaccttcatttctaaaacaggactattaatcctaaatcaaaggatgctggggtgatggagcaggttttgagtagttttgagtggagagcagctagcattgagccaagcccctagaacctgctcaagagatgagagtgtggctagtccctccctgctcgcttgcgacccccaagaccatcactgaaatacacagggaggtgagggcctcaagtacctgagacgctaagagtaagcacagagtgggtgaggagcctctgcctaggggtcaagtcagtgtcccgttgggttgcagaagctttttattgaataaagttccagggctccagtgatctgtcaatgctgcacctgcagcctgaggaagtaggaaaagctaggtgtccgcttattcagaggggcaggatagcccacccaacgcttgaaacgcatgtgcctttccagcgcagttggatctagctttggaaacttggaagactgatatgaagatggtcccaggctgctgcagtccttggcactagagggcaggccagcaggttccctgtctgcccgggtcaactgaacagggaccttggcaccgactgcagagtggctgctgtctacttaaacacacacacacatgcgcgcccgcacacacacacactctccaaagggaagcttaatatataaaaaatatagaattcatagaatcaaagtaaaattgaattcctcaggcagtttaactctttccccttgggcaggaaaaggttcagttttgacaaaacctcgaatacgcctccgctgagacctgctgtcacagctctgggtttgagcatccacagttcaggatggagggagaccccagagatagggccagacaggcctccgcccctccctctggcaggtccttcatctccccaaccccagcttcctccaaggtgacatgtaaagacagcactgtccagttcctcctgtcatcatggagataacagataacatgcagcgtcctggaagacactccgtggtcaataactagcagcaatgactctgattatcatccacatttgcttcctggggatacagaaatatatcctccctggagcctcggttctcctggactcagagagggacatgagctgctgctctgagctgttcctggtgcaagagctcccaggctgcacgcgccaggcacacagcacatgcccgggacacacctgtcgagtgaacacatggacaggcacagccaaatctttctgacatcttaaaagcactgaaggaaattctaagtcctcttaaaaatatatctttaagcacatctatgagcatgactttcctcacccctatacctgcaagcagacattgttacccttgagtctaaatcatcttttcccttttgcgttgcaaaaattttccctgacagccaacagaacatattcttcttctaattgttggtttacctctcacaaacgctggtggatctccccatctctaatcctcacccgctcattcattaactatcaagtgtggctttttggaacaattatattctgtcctgctgtcagctctatccacacaggtagagaatacatcccaactccttacatgggatgtaaattattgctggcataccagtacctgaagaatgattacacccagtgcacagttaaataatggatgcttagcacagtgcattgtaataagcaaaagatatgaaatatctacaattctaagtggaatacgctaagtattttttttataataaaaccgttttgggggaagacaggctattgaatcatggtctccagaaaagacacccatgtgtcagttcatttgcagaagccggctggcgctgtcatctcatctgtgaagtggggacaagaatcatatttttcatcaagtagaggtactgcttagcactgagcctgacacacagtaggtgctcagtaaatggcagtagctgctgtcatctgaggaatggctgccctggctaggctagcagtaggctggggcagtatctcctcgtgggaagagcagctggagtgctcaccacctagatgtacctgtggtcaggtttggtgtctgaccacagggaggggcaggcacaccaccctgccccaccccacccacctttccactgggaagctgagggtagagcctgctttgccaccaaacacagtagaaggttctggagggctgggaggaaatggagttagggtggctcttgaagacttctctctgccttggaagccttccagaaatagaaccctggaactcagtgcagtgctcaggcctgagcagtaggggcctcttcctgagccccatgctctgcagggcccttctgtgatccttgtcccagggcaaggagtatgcagatacaggggacatgtctgcctgggacctgcatccttcccatttcagagcatgctttagcccccttaggaagtccatttcacagcaaaggaagctgaaacccagaggatactggtttccctgcaaagcagaagaggtggtcttactaattccaaaccagttgttccttattccaaagctgttctggcctcaccctgcctcctgctccctagtgacatgggtgcctgggatattttgcacctgtgcaacaggcacctctttgacctccttcacagcaaatgaagctgagacccagaagataaaggattccctgggaagcagaagaggtggtctttctaattctgaaggtgttctagccccaccctctccccacgcctcccaaccctgccgtgatatgggttcctggaacctttgcatctgtccagtgggcacttctttggccacctagaccagtccatctggtgttctcaagccaaggcccccggaagatgcagcaggctgtgctgagtgggaatgaacacttcctgctctcattcctgcctggggaggtggagtgggacctaccacagagccagggctgagagcagcagaactatctagaacactcacgccagcatcctacccactgcagcgctgatgccggagcaaaccgcctctgctcaagggcttctcagcagagctcccctctgcagtccccacaggaggcctggagctcgggtggtttcccagggctggaagtgcatggttttcctctgtatccctaagcacccctgggcactgaggcacaggacatagtgctggggtgctgcgtaacctgcagatgtttccaaccttctaagtctcagtgtgtaaattcgtttcctgaggccatgacattaaacatggtggcttaaaataacagatatttattttctcacagctctggaagctgcaagccagaaatcaaggtgtctacagggtcatgctccctcaggcttcaggggaaaatccgtttcttgacttttctggcttttggtggccttcctgaggttgtggctgcatccctgtaatctctgcctctgtcttcgctccacggtctctccctatgccagctcccccgtgtgtctcttgtaaggacacatgtcatcaaagtcagggcccacctggataactcaggatgatcttcacatctccagacacttgattcacttatatcaggtgatatggtttggctccatgtccctaaccaaatctcatcttgaattataatccccacatgtcaagcatgggaccaggtgggagtaactggatcctgaggtcagtttccccatgctgttctcatgacagtgagttctcagaagatctgatggttttatacgcatctggcatttcctctgcttgcagctctctctcctgctgccatgtgaagaagttgcctgcttcccctttgccttctgccatgattgtaagttccctaagtcctccccagccatgcggaactgagtccattaaacctctttcctgtataaattacccagtctcaggtatttcttcatagtagtatgagaatggactaatacattggcaaagaccctttttccaaataaagtaaacatttacaggttccagggatcaggatgtgggcatatctttttggagaccaccattcagcccactactgtgtcctcagttataaggcacaaataataatactattagcctcataaaattatggtgaagatttaacaagacaatgtatattagacaagtgctgaaaatattcagtatagatattttaattttctctgcacatacatttaggtaaaaacaatatatagatcttgataatagagtcctagtgcacgtcaaacatttacttgcttagttaatcgaaaccatctctaaaggttatttgcgtattcagggtgaggtatcctcgtgcaaatcccaagacaaggtgttcccagggacaggggtagttggggtcattagaggggctttaaatatcactgatgagtcactttcattgtactagcaaaataagcagttcaagtacaagagctaaggtttctaagacacacatagacttttcagagaaaaatgcagcaaatggatcaagataagaagaagaaagaacaggattttttttaagattaaaaaaaggaaaacagtcatagatgtccttggcagagaaatggctgaacgcccaaagttgcatctcaactgtgtgcccctccacaggggttaacagaaaagctgaagggcctgagaaaaccaagtctccaacaatatgtgcagaataattattaattttttttaatctttgtagagatgaagtctcgctatgttgcccaggcaggtctcaaacttctggcctcaagcaatcctcccccttcagcctcccaaagtgctgggattacaggcatgaatcattgcacccagctgcaaaatgatcatatatgtaaaaagcaatagtctgtgcatgcatgggtacgctttcctgtgcacatataagcatggaatgatgacatacttctacctcgcaacccggatagaaagggccaactccctgtcccccacccaccagttcaccactgtcccttcagcaaagggacaggaatgaagagggagttttactacttctgtaatgtgtggcaatttctcagcaaagacggcagcagaatttgacagtgcaatctcaaaattaaggaaatttcacatccagctgtcaaaggctgtcaaaggacagctgggtgtgactaaggcagaggagctcctgctcttgtctgaacactactctcctccccacccccatctacagaacagaccggctcacagacaacctcccatactaattctgctgcaaggatttgggtaccttgccaggcaggtcctgggcacctggcagattttgaatgggagactgagtgacctgctgaccagccagcctcctgagacccactggcaaataccctgtggtcttagcatcccctgctccatccacttgcatgaggacaaaatgaagagcttcaaggtcatgcctggttagggatgctgggtaccctgggtaccagagtgctgtgcccaagggtgtacacgttctggtccccagcacggccgggcctgcagaggaggcaggagtgagtcaccacaaagctatgctgcacaggtgcagtgaaactgtgatatgctgggaactgagcccaggctgggctgtgggccctggaggaaagggggccggtcagcaccaatccccggggctgaaatataaaacacgctgtggctcgccctctctgagagtgcactggctttcatatttctgaggctttgttttgccacaatggatgcatttctgagttcctgtctttgtaaacagataccgttcaatgcggcgggtgattttcaggccatccgcctctctgctttcccacattttggaggagcagagttcaagttctagttcttgccctagctgtggtgtgatccacatgggctgagtccccattctgggctccaacctgctctgtgaaactgcagtcaatggggctagtgcgtgtctaaggacagcgggaagtggcctgctctgaagtcatccatgaatcctcttagtcattccccggggtgccctgatgctgatggacaaggccacacttagattcaagtatgcaaggaaggactgcagcatctaaaagctatcacctggccagcatctggagaaggtggtgctgggggcaggtgcctcagcaggagtggggaaggaaggaagtcacttcaatgaatgataatgaactttgcccaacatcctcctagctagaggagagtctgggtttcctttccagagactctgatcagacaaagaatcagcttttggttccatgctttcctggctctctggtgactggagaaggaaaacgaaggagatgaggtttccactgttgatcatcaatggggaatgccaaccaaattttgcagagtgttttgaactcccccaaaacccctctgcagtaggcaatggtgaatccaaatagcacacatctaggggcagtgaggacgggctctgcttgctaccctctgcagggggacacagtaagctgctctgaaaccccagctgctggctggagtgggaggcagcctggatgctccagaaactccaggcctgcttcataactcaccatgttgcaggaatgtgtcatcctcagaacaacgtcactaaaggcctgggggatttgcgtctgcctcaaaatcatacccggccttattttcaaatcactgcgcttaccaccaagagttgtgccctttcttttatgcatggcaggggcgccgggctaacacgacctgagctcccttcccattcaaagccacaccacggacacctgtcactacagctgctccccaagcggctgtgtgtggttttggccggtgtcacagtcactcaagcaccccggggtttctgggggcagggtcagcttgccctaagacaggcagagcagcagcagaggggtctgcgcatgggaattctgtatccttctctgcagggaatggggaatcccttgtccttagaaatctgggggcatctcatggcctctacatctaaaagaaccaggtaagcccccccttactcagtgccaatcctgttcaagtgttgctcaggggctagtgttggggtgatgagtgaggtgtttgcagtcttgggaagaagctcaatgttcaccctgtaacagaagttgagattgcccaggacaggaggggacggtccagtcactggaagcggaggggtgtggggtgcaggggatgcagtaggagagcgcaggggtggcgccaaaactgagtgcatggtcattcttcatcaacacaagcatgcagccttggtccccatgttcaccctccccgaggctcactttctccccttctgtgaaatgagattataaagtgactttcccctcataggactgctgcaggatggagagagacagggaacacagaggaatccactcagggcctggctcctgcacacccaccacggtggccttgcttttagtcttccctgtctagtgaagaatccctttacatctcattagaatccaacacaccctctgtgcacatgcctgccgcccagccccatcagctctctctctgcgggggtccttttccaggtgcagtagacagagagaaagattcaggtctcaggtgctcccaggctggggcgagactcacctgtaagcagattgcaacatgaagtagtgacagatgtttgcccagagggcctcgggagtgactgtctgtgcctgggggtattccccagggcatatgaggcagaggcgctctgatgctgtaacacacacagcaaacatgtacagagtatgttcattcttttttatcatatatgccttcattttccattcattcattatttcttggttatctaccatgtgccaggcacagagaagttttgcaatatgggaacagccctccattcagaggaagtgacggctcctgacggaggggctttccctgcacagggtcactgccctgcccgcctgtcctcacagtgccaccgtgggcctgaggctgcagctctcactgaggttcgtgccactggacagtctgcctggctgattcctctgtgttccctgtctcgatctccatcccacagcattgtcctactcacagcaccaaggacaggactggacacgctacaggtgactgaaagcaaggccgccatggtgggtgtgcaggagccaggtcctgagtagtgagttcctctgtgttccctgtccctctctatcccacagcagtcctattggtcagtcctgttgacagctgtggcctttggtgtggggagtgctccagggcgggtgctccagaagaggtgtttcctccctggcttcagggagcgctttgtaggagagccagagatggctgcacagaggccattagagagaatggacattgtaagcagagggaaggatgtaagccaaggcacagagggctgcgctactcagggtggcgagggagcaggacggtgccgtggggaactgtgtgctcagaagctaagcccagacaccagccccagagggctggcctgggaaagccaaccagagtgtctgagcgactctcattccctttggtgccttagcctgagtgttctgaaggcagagctgaggcaaaacagtatatgtgagtagtttattccggaacatgaccccgtaagcagggatgagggaaggaggggcaaaagcagcagatgcccagccaatcgaaggacacaccatcaaattcaccactgctgtgggcaatggggctccaccccaggacccctctggaggaccccgtgaaatgactccaaattatccactctggagaaggaaggctcctccgctgttggtcaggctggccccaggacctgctaagtcactgtggtttaagattgcctggcagcacagattggccggctgcacgggactatgctgcagtctcagaccctcctggggaagacgcgaggggcttgtccctgggcctgacctcctgcctgctctggttgcttctgtatggactagtcaccacctatgcagagtggtccctataaaaaggcttgagtctgagagttctaagttgggcacgaaagcagatctgactggggatttaaggaaaagcaaaagccttcagccccagctgtctgacatgggtctttgccgagggctagattttcccaaacttggagccaagcattccagggcaagtaactgatttgggaagtgcaagggagacagggaggggactgagtgaaggatggcacccagttaagggggtgagactggggcaattgataaactgggtgactgcagcttaatcccatgagaagactcccggaaacaagcatcccaggcttattcccctctaccagaggcgaggagctggggttcagacccatccatggtatcttacaacacaattgccaatccctccccaaagtccctgtccatcattggttgggagcagctcccaagggtataagctccctggctcttggggcctgccatgagggtagagtggctttctcaagttttggacaaagctctcagacacaggaacgcagattccagctgttctgtccagtaaagcccttgatccaggcctcagccacaggacatggaacaggactgctgcaggctgtcttgatggccaggagaggccacttgcaaacccttgctccaagtcctcaacccgggaaatcgcccttctgttcaacaagcacttcctatgagtctctccctggctctgttttggttttctccgcagccagcagcaccctatcaggcatgagagtaaatgtttatttgcttcttggattatggtctgtctcccccactgatctgatcagctctccaaggacagggattcggtcatactgttttatctcaagtgcctaacacagtgccttgtccgtgaaagatgctcacatatctgttgaatacaggaaataagggaaggaagaactgatgcctgagattctcggagactagctgtcaatcaatgtagtctcccggggagaaatgcaggtctcttgccacagcttagcataagtgtcttcccttggcttcccctgggccctagggctggcttcccaaagctgctgttcagtggcccatcgggtcgattcctctaggcaccatcacagccatttccagtacagtgtgagtcctctgtgagtcccggcaggtctgggatccatgccccggcccgccttctctatccaaccccagccccacggtcttgcttacacatagttggtggtgtaaagtcacggcagtattcaaaaggttaaagcagagtgaactgttaattttaatgctttctctaagattcagttttaataagcgaaaatgatgttcttatttgcagtaaagtggtgttataaaattctgtctgtcaagatcattttaaaaccatggaaataaatgatctgacaaaatcaggctattagacaagtgaggaagagtgatttccataaaagtagaggagctgttccttaatttcacacttggtagtcttttgggtcgactaaatttttaaataagtgataaaattatattagcgcaattgcatttttatagatttttttggtcattgtactctttttcaatccctttattttaactcaaactgttctgctgaaaggttactctcaacttatgttaccccataacagtcttcagcccacgacatggcctgaagctcgcaaatcctcagactgtccaggtagggtccagtcgaagcatgcgtctgagaaatggtcgttccctgctaggcacatgggctggggtctgtggtcctgggtgcagagggagggcagggaggccactgagggtatcctatggggctgggagctcacctgtccctgggtatctgagctcactcaatttttgctggaaataaaaaaaaaaagagaaataggaggtcatgttctccagaaaccctcattcttccaactcaagatgctgggtgtagacggcagctgtcactgtttgctgaaggagctgcatttagggaagaggagagaatggtggttcttttgtgatccatcacgtgcccaccctctaagaaccctcaaatcatcacatctccagcccaggccaaggattttgtctcagtcactaggaaaatccttagagaaagcccaagatcccaggtctcttgtgggaccaaaatatcactgatgggacagatgtgggcccagttgcgcgggagagaggaacgcttccaacttgacttttcatcactagaacaacttctatgatgtgcatctttcatacttccttctgctctgccctgtgctgattgtccaggttaattgttcagagggcagacatgggcctcctgcaggctcagcctcagccctgagccatctccagggcccagctcaggacctggggtctgcatccctttgctgttgtgattttggctaattctgagacccagccagcaacttctactcccctctgcatcctgagttcccctcttgctctgtcctgcccagtccccccgcccaggtctctgtcagattcaccatcctcgtctatgtctggtcatctcttgtccgtggtgccctgcctaactaagtacagccagtccggtgatactacataaagtgtactttggcaaattaccgcccctcctcttcagtggtcaggtctgggttcagaatctgagacctggggctgtgcagaagctgggagctcagccttggcatccacctgatctctgggctctgtcctcctggcatgcactgaggaactctggctgacaggctattctctgggcttcccagggcagcagctttttaaaacatgtactcatttccaggtagtctttttccaggaaaaatatgaagctccttagtgagagaaaacgcacctttgttgagcatctactatgtgccaggcacagggctaggctggcagagtgcagtcaatttgtttattggacaggaagggtgtggcgctcacttgggaagcacagctctgggaacaaaagaacattttgtcccagttagagaatggcctcctcttcctgaaacccaagtaccagggaaaaggagaggcaggctgtgttagcacttaggaaggcactgagcttgaactcaaaggttgtgagaatccattcaccacatgcatttttaaaattatgaatttagcccaagttttctcagcaccttctgtgtgccaagcactgtgccggctcctataatattaaatagaaggccaattttgaatgcggggcgtggtggccagggaaggatgcctgcattctcctagaggacctttcaggctgcactcttggctcaagagtaagagaagcaacctggaaacttatatcctcctgtgcttcaatctccccatcagtacaatgggtgctcagggtgcccaagggctctcccacccctggcgccctgtaggcagaacatctgtggacattaagaagccaagaactgcaggctgggtctgtgtgccctctgccagccactgaacactgctctgatattcaaaggagcatcttcagaactcagaagtcaaaaatcacattctccagagtctctgagaggcaatgcctgagcttaggggaatgttaaatttccagtgtttcctgcaaaagaggaagaagcaccgataggcaaagcccgaggggtggccttggagggacagggctgtctctcccaaggaaggaataaagaagtccaaattagtcatgttgtattacttctttttatggcaatgctctgaaagtctgcaaatgtcagcatgttaatttactgtcactcagtgatattatttcatcctttcaaaaatgtgtttcttgcattttcagtagcatactccaagtgttctccatctcaaagtttctatagatagtgcgactactttcactctgaccgttgccaaaatgtagaaattcatcgttgactgcagccacatatacgttacaagtggagctgggactcgggtttcctgcttacagaaaccgggggagaggtctgaattttctctgtgttcttgttctatcacctcttgtcctccaaaagtactctgtggtttctctctcaaggcacgtgcagagataaatttcatagagagatgttaagccatcagtcacggctgagtttgtatatgaagtcggaaccctccctgtctgcgagcccagccccctccaccccaatgattctcctatggtggcaaacttatttcaaaaattctgatgaaacactttgtaaattttgttattctgtgatgataataaatcattatagccttaaacacttctctagcttggagcctcagtcacaaattatcttgtcattctgaccaaaacattctccaaaaaagcttgacaagtgctaaaacccagaacatgaaaccatgtgttgttgtgaaagcaagattcagaaatgtcaattaattagattaagaggctacttttagctttacccgtgttgccaaataacccttaaaatatgcatagcagtggaaatctacctccgcggtacagtacttcagtgctgagggaagacaatggctcggactaatggacaaaattgttgtatctgtcagtcagctgcaaagaatgatctagaagcaaatgtcttgcttctttttccacaatgtgatttcacgagctgggtaaatgctaccatttatgaattcgaagagctcccccctcccactccacctcttaaaaatcatacacagatcaagaagaaaaagtcaagtcgttttcatatgtctttactagtaagataggtttttaatgtctttctgtgcttttttttaaaaaatttgcatttgcattttgaagttcactttgtaaaaaaaatatataccgtggagaaattatttaaatgtttttttatccctgtttcttgaaaatcttatctttaaataatctatatcctcaattttatttatgccataaactgttcctatattttaatggtctgtttgctttaaaaggggttgttggttttaatagctcagttgctatctttgtaaactaaactccttctgacgaaattcgagcagatcatctctgcctgtgagtggaaggcacattccaacccctgaaaaggaaatttaagccaaataaatgttctgcccaaattaaaatacataaaatgaatagttaactcggacaagagctgatggacgcaacagttgggctgcggacatgtgggtgttgagagcgctgactgccaggcaggacctcaggagagaaaacccagatgaaattaatttcctgtaaccccctttgtccattcctcaggactaattgatggcagtgctggcacggacatcttgggtgagcagaaatgaccagggcagacagcatcgtgaagggtggtgtgggtctctgccctgccggggtctgaagatggctggctcagaattgcagcctctgagccaggacttggaggtcccggaggacagggacaggaaactctcctccaaattctcaaggccgttgaacccaccttgattatattagaatccatgtggattctggcactaattttaggacaggtcattttcatggaggaaggacaaagaaatggcagggggtggggagtgtgggcactggatgagaatcctatgaagctttgcaaagctgcatggagatgtgacagcagcccctctcctcttggcattcataacctcgccacccgctgcccacggctgccccccagcagcgagcacgaggagctgcgaaggcatgaaggaaagctgccttctccccagctggagtgcccccgtcctgctggtcagggcaagacgtgccctgtggcaagtgggggacttattgggggagggacttcctgcatggggccacttcctgcatgatgtcattttgtgcggggccaagagaggggggacagtgtgccctgcagcaggcttccaggtttccatgtctcacagatcctgtgggtcccccccactcctcacatccccacccctctcagccagtcccactgtttctagctagcaatgaggcaattaatgagctgtatagaggccctaagttatctctggaactagatgggtaataaccacataaataagtaaataattaaataactaaataaaataaaacggatgagtgaggcaccagagctctagtctccatggaatgagttgtacggggtagcagaaacagtgggggaggagggggaggcccatagctccagccttggctctgccactgacatgaagtgtgtgaccttgggcaagtcactcctccttgctgggagctctcccacccgaccaaagaccccatgtagaataggtgccaataggagtgcagtggggagatgggagcatgaatggtttaaatgtagcaggaggcaggggtatccaaatggcctcacattccttcatcttcccggtctgcatctggccaaaaccttcctcctgcaagccctatgattgtggggacatattccacctgtgcacagggaagccaccctcagccagtgacaggcaggaggtggtggaccatcagctgccttatcctggggtggggccactcaaagatgagagtttcctgcacaaacctgcagaggttcctggggaccaagtaccagtggcctacagtggcagcttgctccttaatgcattgggaattagcttcctttttttccccatctgcctcctcctccctcctatctgaacgttccaggctcccttgtcaaatgaactacctgccctcaaatcctcacctcagtcccgcctgtgggagagcccagcctacaagacagatagggaggagcagggcccagggccagccagagagcggatgtcctgtctaaaatgggcggctgctgcccggttccagccacctgctgtcatgcaggaatgtggcatccggagatgccagaaatctcactgttgtatgaaatctcccaatcttcaaagtttggcaatgaattcaagttttgtgggtttttctttttttttttttttaagccgtgtggctcaagccaaacaaatcggcaggtcatattccatccatgggtcacattttgcaacctgtgccaggtaaaatattcattgcgcagttcaggtgccagagacagggccagtcaacgaaggttcctctttctagtaaattctggtctgcagccataacagggtataggaagtcatgatcaaaaggaccagcagtttttgggcagagaggcccactctgactgtggggtaggggtccccagctataccttgtggagagagtggccaggaggttctcaaggtcagcatggcccaccctgtacacttctggcccaaggaggaggagacactgcctgccccattaggagaacctgctcccagtgggtcacaaaaatcccatagccggctgggtgcagtggatcatgcctgtaatcctagcacgttgggaggctgagggaggtggattacctgaggtcaggagttcgagatcagcctggccaacatggtgaaaccccgtctctactaaaaatatgaaaattagccgggcatggtggtccatgcctgtaatcccagctactcaggaggctgaggcaggagaatcacttgaacctgggaggcggaggttgcagtgagccaaagttgcgccattgcactccagcctgggcaataagaacaaaactctgtctcaaaaaaaaaaaaaaaaaaaaaaagaaagaaagaaagaaaaagaaaagaaaagaaaagaaaagaaaatcccataccttggtttctcatcaggattctccctattgtaaattgaagtccttgaatcaggggtgccactccttgaggaatttgagaaggtcatactagggctcattccccctttagcaaactgaggccagacattattcgagatgcacagagaattacctaccagccctttgcatcccggactggaaccctaaacatatggcttgaacctgaccttcaggcagagccaggcctgctgctctgggcctgaaaacaggtgggaacacacctactgtcactattgtgaaaggaagcccctttcccctgaaggttgctgagccacacaaggatgggtcacccacaaagggaaaagtgcctgagtccaaggcagagtcagagcgaggtggggtgctgagaagggtggaggggcaggttcctggtgacatcactgagcacccatgtccagttgggcctgaagccccttatcctagactacagtcacatgagcccaaatcccttccttttcttaagatcctgagcaaattcctgctgacagcatcttgacaagcacccctggcccctgagcctggagaggaacaggtgtcctgtgagttacaggttctgcagggcagtggagagcagtgtttgttaactgggatccaccacaaaggcctagaggtggacctcagggagcccatgtccccctacacttaagcatcttaagcaacacttaagtggtgcttgcatccactttctcctgaggagagagactgtatctctcaaagggcctgcaacccctaaaaggtcaagaaactggtatacccagcctcatcaacataacaagaccccgtttctaccaaaaaataaaaggattagctgagtatggtggtgcatggctgtggtcccagctactagggagggtgaggcaggaggatgacttgagcccaggagttcaaggctgcagtaagctatgattgcaccacttgaagtccttgaatcaggggcgccactccctgaggaatctgagaagttcacactggggcttattccccctttggcaaattgaggccagaaattattcaagatgcacaaagattcacctacgagcccattaacacgacccttttcatcccagaccataaccctaaacacacgacttgaacctgaccttcaggcagagccaggaaggcaagagagcaacaccctgtctccaaaaagaaaaaaagttgtggtataaagttctaataaatccccatctgagacacacgggaatagaataaaatgcatttatctctaaaatggtaatggtgatattttgctttggacgattcagaaggcactccctaggatgtgacaagtgacaccatgagcctcaccatctcaaagcagggccagagggacatctagggaccaagcccctgtggtttccgccaaggagagggccagccctccaaagccctcccctctctgcaagctcaagtggcatccatccttcacagtacacctcgggccctgtccggcccaaggaagtgctcctggccggcccacttcaagtttcagggtttgagccttgcaatttcactttgttttctgcccaatcgtgttcttcattcactgcgtgttgtcattgacttggcatgattgtggactacatacatgtctcctctctccagcttgactccaaacttatgaaaggccaaggcaggtcttaggaattttcttcttgttcttgatgacaacacagggcatgagggccttctctcagcctgcacagatgagatgagagctcacccttgcctgagaattgtgcaagagatgagagctcacccttgcctgagaattgtgcagggtccaggagactgacctgggccctcacatgtcttgggggaaagctcctcagaccctctctcagaacaaaaccataggacctccatgttcaaatgggccatggtggtcaagtcccttgcaggccctgccctcactcattctctaggagtctggaagcgccctcaatcccccaccactccttcccctacccgtgtccccagagcctccatcaggcccaagcacaaggcaccatctcctcagcatctccttctttcccctgcccccactccatccacccttcccccatttctttcaagggtctctctggtgggtgcctcatgtctctggcttttagttccatttaggagaataagcccattttttttttcctggacttcagaagctttttgtccccactcgccctttggaagggagtcacacaggggtgagggtagagggcatttagagagcagaggctgtggccaggatatcagagcaccttctcctttgggatcattgccaagcactatgctgagcttgttgagaatggggatattgaaaacatttgagaaagctgagatgagaagctggagagagcagagtgaaggttggggtcatctgttcaatggtcacacctttgacaagtgcagtaagaaggcaggtgatatggtttggctgtgtccccacccaaatctcatcttgaattgtagctcccataatccccacttgccatgagagggtcctggtgggaggtaattgaatcatgggggtgggtctttcccatgctgttcttgtgatagtgaataagtctcacgagatttgatggttttataaatgggagttcccctgcccatgctgtcttgcctgccaccatgtaagatgcgcctttgctctttcttcatcttcctcaatggccgtgagacctccccaaccatgtggaactgtgagtccattaaacctctttccttcataaattacccagtcttgggtatgtctttattagcagtgtgctctctttctccctgggaccacccactggtgcagtacccccaggaaactctgggttggcagggtgcctctcatgaaaccagagccccaggagacccaagccctagtctcactgaaacacaagagccaaatgtcaaactccttccagaaccatggcccttttggagataggggctgggagggttgggtaaggctgtcactgggtggatgctccgtgtttctaaagcttctgaaaacagaagcctggctgatcttcctgattgacacagtggggcccaggccaggccactgatcccccaatcctcatctataaacaggcatcacagagattacagccctcttccctcctaggatggctggggagaaagacacaaaaagaaagtagtgaggtgagcttgtgccacccgagaagaatatcaggacatgactccttgggttgaaagcaatgtgggagaaggcctctgctttcttgggttgccaaaatataaggaaggacctcctgtacaatcttggctggaaggcttgctagagagatgagctctgagtctcacctttacggctgcctccccgggcaaatccatccatgtgccatttcaacacagggaggggaaaattcctgagaccccagttcaacagacacagtctcttgtaccccaagctcagcgcccactagagagagggtgggttgggcaaagtgaggtccccacaggtgctatccccagtaacctcagctgcacggagcagcccctgctgcccagcaggtccacacattgcaggaaagccgccttcctctatctccagccacacgcacttcttcctgagggctgtcatagcagcccttcaaactcatttgactgggttgcagctcatcacactgtcaccaactcagttttcattaggcggctgcttctctgttagcctagccaagcagaagaactcaaacacatgcacaaattaaatcgacatccaaactccaccaatatacaaagcaatttaaatgatactcattagagcaatgacaagccctgatgaggctttcaggagccgggtccttcagcttttgccgactcggtttcatggtcactgaggcggaagtccggcgaccgtacctccattttttttaagctaagaaaatgactccttcccgacagacacacctatctcattctctctcttttcctcccagctgtctcttggctcaagtttacccagccctggtttctggacacaggtatggccacggacaagagagtcacataaaggaaaaaaaaaagcagccacactgacttcttttttccataaatgctccaattaaaacagatttcagtttctcataatttcatttcacttggcctgggagatctctaactcacaattatgacggtcataaatgtgtccctggattcctgctgtggaagaaaaaaatgaaagtgaaatgttgaaatgcagtaatttaaaaacttaacccccccaaatttaagaagtcatttccaaagtcccatttatgtattttaatttttaaaaagaaagcaggatggcctcccccgctgatgcctggggcttcaaaggccaggacagaggcctaatggggtctgcagtggtgcctgggcagggagtcccagtacccccgcatggaggctgacagccacgccagccacggagccaagtctgtctccaagtcattgggtgcaaagaacagcacagggaccgcctgattcatcactgactaagggcagagcaaggtcacgactacatccatcagatctgtgggctttggagtttgcagcctagatcatatccacagcagggagaatgatcggcaacttcatacaccggtgcctgtacttctgtttataattttatgctcaaggttaattatgtgtgtccttggctttgatcagagatagtagcatgtgagaatgttgcctgtgcccatattggcaggataaggatttttagaaatacccatgaactggaaacacacttacatcactgagatgtgagctcttacccaggaaactgatttgtaaatcatggtatagaaagcattgtccaatgtccagtggaaatttgttggtttgtttgtttttgagacatcacaatctgcagcctcaaactcctgggctcaagagattctcccagtcctgcctcccaagtacctgggattacaggtgcacgccaccatgctcagctaatttctattttttattttttgtagagacagggtctcactatgtggcccaggttggtcactatgttgcccctggcctcaagtgattctcccacttcagcctcccaaagggttgcgattacgggcttgggccactgtacctggccttccaaaggaaccttctatgatgatgggaatgctctgtgcctgctgtccaaagagtagctgctagtcacatgtggttagtatgattgactgatgaactaaattttaatttaatttaaatctggatagccatatgtggctagtgtctactatattggacagcacaggttagaaggtaagtaaatgtatcctacttcctgagttggctaattgtggatgttaatctctggaaaaggatcacctttcttatcaccttaatcatcaggaatgatttattaagaatatatcagtacctgacattatacaaaggttgcagaaaagcagtgtctctgatctgctatcattagaatttaattcttttaaaacctggatttttggaccagaggtggggcactgacaccccaatgctgagcctccagaagccgtggacttatctaagttacccctggtgtccacagcagtaccaagactgagtcatcattagactgcctggtacggctccagccttcatggactgtcaggccgctaaccaacaatttggctaatctattgtcttggcagggcaggggatatagttctgaatcatccagcgctttgggatgcaggcccttggaaccatgaaagcccaccagttccagggttcgctggcctttaaaatcctcctgggggtcgcctcctgtcaaatccttagggacagaaaaatggtgcccgtgagtcaaacagcatctccctctggcttgtggaaactcaatggagtgtgagaaaaataagcaaactccctggaaacaaaaccctgggtttgatcgctgctctgcagtgacacccggaatccagccctcggctgcaacaaagctgccacacggcacgcaggaaggtgaggtcggttctatcacagaggagcttgtcttccctgaagctttatgctaagacagagcgctgaagccctacccaaatgagccagattatttccagagctaactatagtgtattttgcagaggccggtgagccctggcactgaatggaggtccaagcctgagcaccttttctgtgttttctgaggtcagctgaatgctgaaaggcatccaccagcacagggtcccagggggaaatgtatgttcaggctgcctttgccaaagattacacgtgctcactaataaatccccagggagaaagaaggctcctgtttccattaccaaaagaataactatctggcagagtaaagatggtaatttctccattagctaagacgataatagctattattttaaagttaaagtatttattattaaagagcggtgttggagtttgcatgttttcagtggtatgattgcttcctctaatacaaagtgtattattttcctgctaaatagtcaacagaataaaacgcaattgcaattttccaatctcaaaaggactgtggcagatgaatttgagaaaaaaaatcattggatttatttaaaaaaattttttttattagatgacttggaaatgtctaaagatgatagttttcatcccggacttgttcgatgcagcctggcttcccgtcagctcctgtctctctgccactcacgggtttctgtcttcagaattctgcttccccaagatggagctggacggcttagagggccttttttcctctataagtattttgtcaccacgtctgtggaactgtaggtggccagaggctggggatcagtgaagtcacctagctggaatggtctgaacttgaggaaggaaccacagagactgccgccctgaactcagctgggaaggctgtggacacacaacctctgtctgagcgcagggcagagaagggcctgtttggtggttatcaatatatatattttttccttttgcagaatgaaaatagaatagagatgccagggagattgggtcctcatcataaccaaccctctctaacttacatgtaaggattttggttaattatagaattcttgctgcctaaaacttaaagatacatcactgatatttttgctaaatgttgactgcagcgaattgctaagatgtggcatattgatttcttgttgtgaagtgagctgttcaagctccatttaagattttcatcttgcatgtagccctgagcacatcatagcaccataaattagttaaattgcacatttatcacaaatgttattttaagatactgcgtacatgtgatggtcggaagatatacagtaggactgcagcaagccggggcttgggcggggtgaggtcagggtcacccgcgcacctgtgattaaaacctccctcccttggcaacatcccccctcctccctgcacccatttaaaggcctgacttgggcgaccaatgccttcctccattcactctctcgcaacagcaaccgcagaacatgagcactacgacagacgcggagtgcgactttacaacttcctgtcttatctcagggaaaccagggccattctgggctggggtgaaaggttcttccggacagtggcccaatctttagccaggcaaaggtttggtaacctcaggacaaaatggccctgaatttccaagtagggggagaccgtaacaaaccatatccgccatgctgcctggttcatggggttgttattgtgccacgtgaggtttgcattcgtgcctggagccctactgcccaattctgatgtttctctagaggtaaaattaattcatggacccccacgtatatgagcagtcctttcctggctaaacgcccaaggtgtcaaacaagcgagagaacctgcggcctaccttggcttgtaaatcctcacaccaacccccaaattggaaagcccagaagatgatcctgggagtggggtgaggagatgggcaaagtgtgtcgagtcctcccaaactgtcaagagcggggttccaccgtcactcgtacaaatcccatctcccttcaagccacatgggccctggtggtgatggaagtgttgtcagtttaatctgttagatgcaggactttggattctaataaaccgatgctatatttaacctgtgaaaaattcaagcgtggaaatctgggctccaggatgtgaagatgcggaaggcacgggagggaggatgtctctgtcccctgagacgcattctgtggggagctggtcctggagggaaacatatgtgtcctttagctcctcccaggtaaaggtcagtaggacaaagaacaggccagaaaagaaccagggccagccacagagaagatggggcctggcacaggccctgcaccaggaggggaacctgctttcttccctgcctggccgtaaaacccacctgtgtgcccacatcccaaggcaagagcttagctaacacagcactctctatttgccaaacaactcattttaaattgtagtgagtttctccctaaaaacccggagaaagatggaatgccgagagaaaacagagtagacagaaaaatttggactcctcttgagaaaaaggggtggggatgagcggaaaaaccgtaggcgtgttgccgaacatctctgaaagggcttaaatttttaataaaatatgtgtttttttttttaagttgaggtgttttatgtattacatggatgtaatacatctctcatttgtataattctaggttaggagctatgattctgcataactgcaagagtagtttgaatatagtaataaaggtattttacaattttacatgatgttcccagcgttttgttggcatgatttgccggggctaataaaagcttgtgattatcatataaatgctctccccctcctcccatggatgggttcagtctcctcccacaacacccctgcctgcttatctgtggctgttttaacacaggagggagaaccttgggaccccaaagtctgtctgacccgattggttctgtttcccgctgtttgaaaatcctgagtcaacaggaaggagtcaccctttcaaagctttctttcccatcagcctccttgacagtgcagggccctgaaccccgggcatccagaagagagatcaaaccccagacccccatgcaggtcaccaggtgtgaccggaagctctgatcctgggggtctggcaatatcccttctgcactgagcatctaaccttataggcatatcttcctttcttgtgaatgtttattctcggtgcagatcctattcgagctgcctctgagtaagtgctccctgctctccaaacgccaaagttcactaaaactccccctgatttacgcacagcttccgactgccagcacctggcagccgcagcaaccagctccgtcataaacagatcgcatacaatttaattttaatgtgctcgttagtcgtagcacatttcagacataattgtgaacgcaacacaaaattatagcaaaaagacaattttaatgctgccgtagaaaaaagggttatatgaagagtcacataatggtgcttcattgtcaacaaccaaacagggcacagagtgtgttacggtgtctgtgctgtttacatgccaatattttatacaaaggttctcatatggtgtcagctgtcagttacttctgcaaattaactgccaaaaatggagaagaacagaatcacttggagagccggtaaccacgggttacctttcataagcctaaagataaagctgcagtgtgggatcttgggagaataattaggaagaacaaaacagaaagttaccaattgaaatagaaaggcatcctacaatatggaatagcaaccaagagggcttataaataagtgaaagaggttggatcacagaatgcctcatgacttttaagcaaagtattacagtacaaacattttaaaggctttatcaatgtttaggaaatacagtacaagttctttttttttttttgttcttttttttaaccttttcaaatagacttaaccctttgagcactgagtttattttgagtgttctttgatttctaataaatacctttaaaaatcatgtgcaaaatagttctgatgcctgccagggatgtctttcccggtctcgtttattcagactgctcaaaacaaatgacaatatgatgctaataaatatgtataatttaaacatgaacctctatcaatatagatgtactgtatagcaaaacaaactatcatactttgctttcagataatgtttctgtatactttataaatgctatctgtggtatcttctgtataatttacaatgtttgcatgtaaaaaacaaaacccatagaccttaaaaaaaagaaaaaaagaaatatacactatacataggcacagcttatgcccagagcatagcaggtgcataaaacactgttgctataaatgcaagaaaaaggtcatttaaccacaatcacattttttttcataagagagtctgaaatctatacaatatatacatctatgtttcaatgtgaaaataatattcttttaaatttcaaggcgtgttatacccctgcagacctgcataaatggaggttcatattattcattataactaagctggtaaggagtttaaaaaacagagcttcatacattattattattttattttattttttaaccaaattaatgcaaaagtgcttcaaagtactcagagggctaaagatgaaagggtgagaaatgccagcacactcgagtctcgtggaaaaggtgtgcctgattccgttataaatgcttaattaaactgtctgttaatgcatgcagcttgaagcatcgggaggatgctcacaactaaatcccgtttacacaaagttccaaacacttaccactgcattttaaccttcatattttaccagtaacaacagctgattatgcacctctattaaacactgtacagttatacaaaacagtccagcccagagtgattctctgcagttaaaataagaacatgtgccaagaacaacaagtcagagggggcctgaaggtgccttccacagtttccctcaaagcaaactgcagtcctttctatcaaaagcaaatgctactgcttctctaactcagagacatacagaaggtggtcttccggagatttcccgtgtgttttgctaaggtgaagtttaacagcgtgcttgctggcaaaggtccgattgcaaagtttgcactgataggaagtccccaggtcttcctcgggggaggacgtcaccattttttctgacggtgacttggtttgtgctatctgactgttaatctgttcggtggacagtttggataagtcccgtagccggaagcctaagtgtgactctaggtgactgatgtacgtggaaggagtcctgatttgggacgcacaatcgttacaaaagaagacggggtggccagtgtccaagtttttgaggaactttgttccacctgtccttcgaagctggtatttcacgttggccagccagtggctgatggtggtcatggacagcccggtgaacctggagatatgcatccgctcctgggggctcaggtctgacatgatgtacttcccttctgaggtctgccggaggctggcggcaaactgggcctggaggatcaggaggtgctgggggttccagtttgactggcggcccttcctcttctgggcgggcgtcgactcctcagcctcctccagagtggccccgtcaatgtcagacttctcggagatgctggaaggagtggaggattttgacgtgtggctctctgtcaagttcttcagcatatcggatatatctgacaaggcattctcgcgtagcggcgagtttgacatgaatgatacgacggcagatgtctttgccgttgtcaccgtggatgaggaggttgccggggctgtggacgtgggtgacagaagcactgaacccaaggagcagcctttgtcactcttcccttttgtcaagtctatgggctggtcgttgttgacgtggtagaaatagcggtcgaggtggtctgccttcttggactgcaggggcggcggggtggccacagcagccttctccgccaggctgttgctcatcttgaaaagcatgctcatggggtccagggcaggcagggagggcttggcggccttgcccaggtgaatgttcatgactgactgcagggcgctcaaagggttaacaaaaggctgttcaggcgggtggtcggtgatgatggccgtgctgccactcaaactgctggctaggggcttcaccagctccttgccattctccaccggctcagcgagggggctcccatccttgcacccatcccgcggggggctggggctgttctcctggctgcggaagcccccatcgctggatgcctccatcttgatgggttccccgacttcgctgctacatggggagggagtggcccgcttgggcggggaaagcttcccatccggctccttcatcttctcctccactttggcaactttctcagtgacctttttcaccagctcctccatggcatgaaagtttgtcttgggcatgggggacgtctggctgctgggtggagagaccagggtctggtttttcgtcggggagacaatctcactgttgccaaacatgggtttcaggggcgtgctcttccccgacgagcccagggacaacttcatcatgttgggaagttggtaggcggcatggatgctgggatagcccccccagctaggagtgccgttctgggccttgttgattgcggatgtcactgtgttttccaaggatttgaggatatcaagcccccccttgggactctcttctaagtcattttcagtcaagtaatggtatttggaagagatgtcacacttctcctcttcttcgccaggcttgtctttttgcttaggtttctcgtcagtgaccgctttctccttgtcgacttccttcttgacctccacattcagttttggggagatgctggcaggtgtattggagggggacgtgaaggtggtggctgccaggggcacggactggaccttctcatccagcagggttgtgatggtaggtgtgacaggcgtctccacaatgggcttcccctttttcatagcagagttggtgaccttgatgaagtggccagtgaccatcatgtgggcagtgagctcctgcagggtgtcatgcgagctcccacactccatgcacttcaggatctgcgacttccgggcctcaaagtgccatgcatagctggccccattctggtggccgtaccgattatttggcgtgatgtaagggttggagttcttctgaagtgcatcgttggtgtctgagatggtggctttgggggttccacctgtggaatctggggagctggggagctccagctccagggaagctttcttccgagtggcagggatgattttggcggcgacaggagtgacgggttccttcagaggcactttttggtagtgttttgttttgatcatatggacactcaaatcctgcagggactcaaaggagtggccacagtacatgcacttcagcaccttctgggcgtcttccttcccttccatttccagcaaggagcgtttgcgaggcttggaccagcgcttggggttgttgttatcggtctcatggttgtcgtcgcggtaatgccccgtctcgttcatgtgcaccgtcaactccaccagggtgtcgtaggcagcgctgcagtccttacagcggaacttgctggcccccgtgaagatggagccatagagcttgctgctctgccggtacagctgcacggtgctgaagaggctgggctccgggagcatgcggctctgtgacacctgctgcagcgtcttagccatggcgctctggtgccagtcgaagctcccgctgccacagctgctgctgctgctactgctgctgctgctgctgccgttgttcttctccgaggagggctggtgcaggttgaggttgaggttggaccagtaggagttggagaggaagttgttgtacacggccttcatctgctccaggctatccgacacagtcgtgtcttccagtgggaccgtgacctccttggtctcctcttcgttcttgatggagccgctttcaaagtcagccattcggtcactggtctcactgatgtgtgactcgctgtccatttcatggcaggaaaactcggcggccggggagttctggtagctggggcaggccctggcgagctccttctccgggcacatgtacttggccgagggctctccatctgccgtatgctcctctgggtctaaaccttcgtccaccagggcagcagcctttaactcttcggaaacataggctgccatgataacaggtgggaaagagagacaggtaggatggaatgaagagagacagggagaaggagagaaagaaaaaaaaaagcattagtacttgttgatcttacctagaatatgttctgggctctcaggaaaacacagcaacccagatgggtacatgtatttgtaaaattaaacagttaaaatgtggtgtttctttggagcaaaaaaaaaaaaaaatctgctcttcaaacataatttgccaccttattcttctcaaggggcaacagcttgaaattaaaactaaatttgaaattaatgaagcacattctggaggtggcattcatttctaaagtaataaattacttgtatcaacctcagagacagcagttcctgtctgtcaattaatatgtcttatgcttctcctacccctaatgcatttcttaacagacagattcacaatttaaattaagcaagcattttttactcattacatttttgaggctcaatctttaataaatataaagtataaaaacatcaataaaatttttaccaagtaaaaagaaaagtacgtccattgtaataagggaaaaacaagattttgtggctttttttttttctttcttccttctggaaaagcaggtctcagaaaagcttagaggtaggtttcctggcagggataggtgtgggttcgttccagttgagaggaaataccctgaccagctaccacccagcccccagccctgtcccccatgtgaacactcagccgttctcagccacctgtgcacacacactctccatgcagaattatgtcacaacaagttcaggaaaattggtatgcggtgctcattcctgatgtataaatatatacaagaccttccagtggaccttacaaatgtcaaagtgtttgctctttagactactttgtcaatatttactcagtataagcttcatgggcatccaacagagatcctgtctttctggaagcgatgtaactgggatgtaaatccagcatgcattcccacgcaggtggagggcaggccacgcgcctgcaggttctggaagatgcacgtccagagacacagagcccagagaatacttgcgttaatgcaacagggtgttttttttgtttttgtttttgttttcattctcttgcattcggtgacttgggttattccttactaaactgatctgccactgcatactgcatcagggtagttttttggacagtgaggagtggccagccctgtggctaggaacaatttcaaggtaaaggaaaaggagaaataaagtgactttgtcctgtcagcttctaaatacttgtttgcttcaaaaggccagtggggaagtgtgttaagtggttggaacgttgcagtgctaattgcaaggctgatttctacaaaaagctcttaagaaaggaagggaagttttgtttgtggaattgactccaccagctttaaagatttgcccctgttccatttcacatcagaaaaccaacaacaacaataaacaaacaaacaaacaaaaacagtgaaatgagtcccttgaagtcaagcagataggcccccctcattccttccaggacaggtgtgattcttttgctcctaagccccctactttgagtgccaagattcctaagccaagacacatggaatcccaacactgatgtaatgtgaacttggatgggaactgccccaggtacacacatcagctgcagggagggggatacttctgctcatttgccaactactaagcaagagtcttgtccaggagccatggatgttctttacaaatgaccagaagagagtgccctgctgcagtcagctgagtgtgaagtgctgtggggaacctcaagtttaaggccatgcactttgagatgacaaataaagacagcaaaagctctgttcctagggccaagaccaaatgcttagggaaatacggcgctggccaatggaggctcctgtgctagccacagtgaagactgtgaatgcatgtgttggaaaagaataggaaaagaaaaagaaaagaagacatctcactctccctcacctgccccccgacagacttcctcggcatgcagcacattctagaaatctggactcaaaactccaatggagtggcaggcctggaggaagaacagccgaggtagaataaccaagtgtcccaatttgcctggagctgtcctggtttcagcactgaatgtcttgcatcctgggaatttactcagtcttatgcaaactgaaggatggcttgttaccctagctggggcacacagtatgactgaggtcagagcatccaggtgggtctgcaacctctcttataatcctctcggggaacagctggagcagagtaggctgggtttagctagacacagcccactgtctgcagaagtgcaccgggtgcatgcatatatgatgtttccatagtacggttttattgtaaacggggaaagaggaggaaatcccatggctggtgtccctcccactgagactcaaggaaatgcccaggcctgtgtagatgggtgaagatatcaaagccccttctgtcctggagatgcctcttggagccacagtctgcaatacaaaccccacaccctggggattttgctcctattacagtggctcccatgaaattaagtctgagagagaaatggccccacagcagccactacgagaggacaccagcagccagaagcagcagagccaatagtggacatgaaagagtcctctgtgggtgaaggccaccaggtgagagggaaacccaggggctctgccagcccacattccacccaggggcaatgcatctccccatggccagagccttccccacccccactgcacaagcaccaaaccagcccaggccgtccggagcacccctccccaacacatgcaccatgaatgatatgaccagctcctctcctgggctggcccacaacacgctctgatatgctttgtaaactacacagcagggtcagaatgtcatcagtctgatgactgaggaggaaattaatatggaaagaaaaggccaacctctcaacctccctggtggaacaagatccaactcagaggagaattaaaaggctctggtgccaagcagaactgggtcctggagagacctggcctcaccgcacaccccactcctgaccatgtcatggtttctgagggttctttcaagcgcacaccctcgtggctgtgacgtgggcctcactccctgttcaaatgaccattttcttttccgatctgaaggtgagaagtatttccttaggtggagcctaagacttttacccactggttctcccctccacattaaaataaagggaagggctgggcgcagtggctcattcctgtaatcccagcactttgggaggccaaggcaggcagactgcctgagctcaggagtttgagaccaccttcggcaacatggtaaaaccccatctctactaaaatacaaaaaaattagccagacatggtggcacatgcctgcagtcccagttactccagaggctgaggcaggcgaatcacttgaacccggaggtggagggtgcaagtgagccatgacccaccactgcactctagcctgggcaacaaagcaaaatcctatctccaaaaataaatacataaaaataaagggaaaattcccatcttccaccatgctttgcaataatttcactactctgagaatatttatactcttgattactgaactttaaaaatgttctagaaaatggaaatggacccagtggaatgagggaactaagggatgaaaggcactccacaaatacgcatcaagctgccacaggcaccaggcaggttgccgcacactgtgcagtgcagagttttgtttctctaggcctctatttccttctttgaatgatacggggcacttgggtaatatttgtaacgtccttcctcggctacatgtctatcattttatggcctttcagagaaggtaaagagccgagctgtaaagtcgcttaatctggttcattctctgcaaacgccaacctcaccaacactcagcaagtggagtagttcctctgtgctttcttctctagactgagcttgacacgcaaagcccctggctggatagaaggaagggctctggaagctggcacagcgaatgccctggatcaggcaaggaggggaggaaagactgggtgttcccagtcactgtgcagatggtgagaagtcaacaggggtgtggggcagggctgtcgagaacctggtccccaccaggctggcttcagtagcccaggggtaggcaccgtccaccgattcgacccaacaatgcatcacatgtgaccttgggaaattccgctactgtctccaacagtatttgagagtatttaaattccttgttgctacttaactttctgtgcattcttgcctgaattctctaagggagggaaccttacttccttagtcttgcatgcagtagctgagcaatggacagctgctgcctcatttcaagtaggtgagtggggggtcatgtccaggagcaaggagttgtaacagcctttgttaacaggatcccccattctctctgcagcctcccacatgggcccagtccagccactagcatctctcaccccatccccaaccaactccctgactccagccccagcccctttaatctcatctccaagcagaagctgctgagattaatatagaatatcaggctggtcatatcacctccccatataacaccctcagtaacttcccactgggctcggaagaagatccaaattcctcaaagcagccctgaaggaagggagtcctccaccatttgcccggttcccctccagcccctctcagcttctgagatgcaccaagatctctcattccttactttctagcactgcctcctctgctggaaaccctggggcaggtgcagtgaagtggagaatgcgggaacccacccttccccgggcctcagggaaaaggctcttggggatagcagggttttgaccccagcttttgtccccttatccatggggatcacttgtgtatggccagatattccaacacattgtcagctttgtgtggtcaggacgagaccccacacacccacaccccagttatcagccgcaaccctaccgtccggcccagagtggccactcaatacatgtcaatgggacgaatgaatgaatgaatgaatatcatagacagctgcttcacacttcctaaatagctgccaaaacatcctgaatggatcctgagtccagccagtcccagtgcaaagcagatgtgctggggtgagacccaaagtccatcctaggcaagttctgtctgagagtgactggcacattcagcaatgccacttcgtgattaaaggtctctggggtagacaggatgacagaacccaccaccaaggaagatgggaggagacaccccagtcggtggtctccttgcattggagcctgcccaagctgtgcccacactcaaataccctcttcaggaatgcattatcggccaggtgcagtagctcttgtctgtaatcccagcatttgggaggccgaggtggaagaaatgcttgagcccaggaattcaagaccagcctgggcaacacagcaagacctcatctttataattcttttaaaaattaaccgggcatggtggcctgtgcctgtagtcccaactacttaggaggctgaggcaggagcatcgcttcagcccaggagattgaggctgcagcgagttaggatcacatcattgcactaaagcctgggtgacagagtgattctgtctcaaaaaaaaaaaaaaggaaaagtaggccaggcgtggtggcttacacctgtaatcctagcactttgggaggccgaggctgggagattgcctgagctcaggagattgagacaaccctgggcaatatggtgaaactccgtctctactaaaaatacaaaaaatcagccaggcatggtggcgggtacctgtagtcccagctacttgagaggctgaggcacgagaattgcttgaacctgggaggtggagactgcagtgagctgtgatcgtcactgcactccagcctgggcagcagagcaagccactgtctcaaaaaaaaaaaaaaaaaaaaaaaaaaaggaaaagtgaaagtgaaagaaaaagaaaagaatgcattatcatccctctatccctcttttctcttgagcaaataagatgggaacctctgctgccagctcccatggaggaggcagctggactgtgagggggaggaggttctcattcaaaccaaaccaacagctgcaaagatgcaaagaagcacacagaagtgatcagggactagcaagtgagaggccgactgggcacccgcattccacgcttccccaagtccctccattgaaagagtctctcaagatgtgagcccctgcggaatggctgcacccgcttccccacacacatctcactttccttaccccaccaatgaagactgtgtgcttaaagcaacaagacagccatcgatctctcaagagctgagtgccaaggacacatttccagacaactgcctgaactgaagaacttggcatgcacagaaccaaatgtgactcctgggtagagacacacatggatgagaaataaaagctcccaaagttacaaaagctttctgcaaagttctatagcccaacaaccttggaagcccacatgatggaaaaacaaaaaaacacaaagacaaaacacggatcctgcctaatatgagcatgtttatgagctgtgttcacattcacacattcattgcatctggtcctctcaatggtcaaggaaggtggaaaaatcatctccattttgcagacaaggaaacagggattctggctagttccacagcacacttgcactgaggaaccagttctgaccccaagccctctgctgcaacccctcgggatgagtcactggaggtagatggggcatttgcctgaactcctaagacccacacccggggtccagtgtcaggggaccacacaggaagtgtgggagggagcgccctgtccccggaatgaggagtgggcagccacgcagaaccttctcaattcccccattgggatccacacctacccttccaggagggtccagcatccccaccctcagctcaccagtggtgtggctttcacaccgtggatgcagggatgacaaacgtatcatgtccggggagagaagagagctggcccaccgtggccatcaagggtctggagacaccaattcgttaatatttattgtcatcattaactaaattcaacctctaggtaaaaagaaattaatatgtgtcatataaatataaaacagtaagctggggcataacggaattcatttctgggcaaggtggaattactttcatcacacagttaggaatctctcccaaaagataaagaggaagtgttggctgggacctgcactctccaaccacgggggccacggatgggcaagtcgtgggtgggagggggcactgggtgtgggtggaaagaaaggaaaagaaagtatggctgtgtcccgctccccaatgcaatttccaagtaaaatgccctgtgagagttagcattttctgggctgaaataaaggttctgaagttataaccctccgtttcccctgggaaggtgctttgctggctaaaactgtttatagattccttttccgcatgtcttcttattacggatagcccagaagaacacccctctttgcaatgagtgcctctggtcatccatccataaggagccctgtgactgtgatggaggaaagagtagagccaggagggagaggaagaggcagggaaaggagaagaaaggaccgaagagggaaggggccatcaagtcatccagggtttgagaaggggtcagagagagaggagggggcccagcagagagaggacagagggagaaagagagatgggagaggaagagaagaatccactagggctggcgtaggggagagagaggccaccaaagggcatgggaggtaggaatggagagagagaacacaggtaatggagatttgagaagagacaaggacaaaagaggttattttctggaaaggactctatgacaaagagggcctggagcctgtgagttctggtacagaagtggccctcaggatggccaccaaggtaaaagaggatggacctaggggagccgctatgggtccattccaatgctggggcctccgggcctcctttcctcctgcttccctgaatactcagattttcaaatgacagagggtgatttctttttctgttttttttgagacagggttatgctctgttacccaggctgaagtgcagtggtgcaatcacagctcactgcagccccgaactcctggactcaggccatcctcccacctcagcctcctgggtagctaggactacaggcactagatacctcgccaggataagagtgctttattgttttttgtttgttaatccttttttttatttaaataataatttaactagccgaaggggatggaggaaggatgatggcttgggaaggtggctgtcaggtgtgttttcccaagcaggctctccaggactcatgcacaccagtctctgcagaccctcctgccctttcctcagagccagaatcaacttcaacacatgcctaagccctcagcaggcacgaagtcctcttctctgctgcagaatgtgcttggacaaggaaaaatgccaagaggctcacaaggcatcttgaccacttctcactccccacttacctgccttcttcacacttgggcccacaacagagcagaccccaaggaaatggcaggaggagacaggaggggacagttcaaaagccatagcaacccaatgtggagagccgtccaagagggcagtagctggactctggagaggacctgccgattctctgctctgtcgcccagcctggagtgtagtggtgtgatcatggctcactgcagcctctaactcctgggctcaagtgatcctcccacctcagcctccctagtagctggaactacaggtaagcaccaccatgctaattaaaaacaatctttttttagagttggggtcttgctgtgttgcccatgctgctctggaactcctggcctcaagtgatcctccagcgtcggcctcccaaagcactgagattacaggcttgagccacggagccaggcaggatctgctgtttctgcattggatttttctctgggaaacaatgtgatgttaggcagggaggccctgggtctcagcttctgccctgccatggattagtcctgtggctgtgatgactgacttcacatctgtgagcatcagtttcttcatcaacaaatgggaggaaggaatgggaagatgcaactggccacatccgcctcccaggtgtttgcaggcaaccaaggatttcataaggagtgggcataaaggacttttctaagttaaagaaactctgcaaatagaggtgcaccaactgcacaggggctgtgctccacacagctccacacagaaggcctcctgctgtcgggaatctgggaggcacggccaggggatgacccctaggctcacccctcctcttgtaaaggcctctgggtctcccagaccctccatgctgacctcatcacaaaaggaggaggtggggggacaagcaccaagccctgctggggtgagagctcccactggggcttgggttctgtccctcctcactctgggcagccttaaaatgggggctgcagaaaaggaagaaagccagacagaaaagagaagaaaaagggagggaaatggagggcaaggaaaggaggcaaggaaggaagagatgatgtcagaagcacgcctgcagcattagtgttcctgaccaagcacagctctcctccccgggccccagcccctggtaaaggaattctaggaaggtagcgggcaggaccatggattcagtcccgctccatcccactgcatggatctgactggagatccccagtgccccactcccaggggtggggttcggagccagatgccctgcagcacggttctggctggggcggcacctcagacactggctctcagattggctgccactgtccctgtagcccctagcccccaagctgggccgcgttctcctccaggctgagcccagaccccatgtccgctgggcttctgccttgaatcaccttcctctgtgtcagggaaagagctcaaagtccccagaaaatttcacctaaatctcagcttattctcaatacacctggaaaatctggatgaattgattcatttgacaaaagaatatctgcttgacaaaggactcatggaagtgccttacacgctgtgccccctgggttatgcttatacagggctctctgctgtacaaacgtgctgcacaccttgctatgatgaagcaaggggatccccttctcaggggaaccacacctgccatatcagctgtgtctgacgccacccgatttagggcctagagctatccccagatgtcctgaggtcccacacaatgggctgctcagaagcagctgcccctagacctggcccagagccctggtgggtgtgagggatagacagacagggaggaagctcaggcctggattgccactaaccaaacacattccccctggccctcagagaacatgacaaatcaagatggaggtgcaccctcctggctcttgaccgggaggggctcaaagcaacagtgtgaaggcaggacttcctttttgtgcaaacagagagaggagatggcagggggaagtgtgggatggaatggagggggcttagctaaacacacactggggggtaccaatatgcttggattgcatgttgggcttctgtctagttattaaataagcagggagaaaaaaagggttctagaggactgtttatacctggtaccgaggaggtgacaattcagtggggaacacaagtcttctccatctatccacctgggcacccggagtcacctagagacgctacctaggatgatggaggtcatggcctctagggacaaagagaaaatggcattcttggatggtaccagggagaccaggggccttccaggcatcgctgctgggctttggagctccccagaaaccaggggaatacccaagggccagaggatccagaagggcatggtttggctctgggggaaggaaaagtggctgcagctgtaatggccaggacttctgcagaaggctggccatggcgggatgacaacctcccctagattgattgctcttcccactagcaaggtcaggaatattaattttgtacacgctaatttgatgtaatgtgtgagatgaatgcttgttcagttgggtatccctgtgttaataaagctgcaatgctttcatcccaagaaaagcatggcattagctgattggtgaataaagtcagtgtgaataaggaaacaccatgctttagcacagcccgagtggccagtggtggcgtaagccaatgacaggctgcggctgctcctctagggaacccatggcaacgaggcttcccagaacacctcctagctgctggaagccccagccggttcagaagactcagagcccaggatgagtcctgttcctccagcggtgatgggaaacaagagtccaagagttccagaagccaaacctggggctcccaaaactgagttaagaaagacactgcctgaagcttctttctttgaattcttgctgcaatgaaagaaccccattgtaccaccgtctagcagctcctccccagaacaatctccctcccttcccagcactcttcatgagggggatggctcagaaaaggaggaggccagaacgtcaggaagctctccaagatcagaaagagaaggcagcttccctgtctctacaatgactctcttccaatgccttctggggagcttgctctgctgcagttagggcaccaatcccagtacaaacaaaaataaatgtatcaaggaggcattcacaggacaaaaaccactgcctcagacaaatcttcagataacaaagaataaataaatactcactttggggaccatctgagtcacctactgtccttggcttcaagcacatttaaactgactgggcatcaaaccaatggtggaagcccgcacctgtctgctgtcatggggagtccatacactcactctgtgtgccctggaggagtgcttcactgctgaaatcaccttaatccatttaagctacagggcagagtcatcattcagccagcccggtgctgggcccatatctgggttgacagcaatcagtttgtcctggtagccagcgacggtctatacagtgaaacatggcttccggagccagggtgcatttttgcaagactggtaaaggaagtaagctgcctgtgggtgccgtattcccattcctctttgagttcaatacatttccaagcacactgccctctcagaataaagaatccagggtctgaacctcttcccaatgtcctttttaccttttattctacaaaagccatgaggtaaatcctggcctatattggatccaataaattagaagagtaacttcatccaaagaaaggattctctcatcttggtggaataggaattgggtaaattattaggggcaggggatgtgcttgaccttctcaaattgcatacatgagcagagggattctcagggggtagctgatgtctttaacaaggcagttcattgaggcagtttatggaaccaaggaactcttgcctgcctatacacttggtgatctaaaaacctgggaaaagcacagttgagaattgggcagcaggctgtgaaaatttgggaacagtccttaaaatgggcctcttcaggtggctaaacatgtacaactcaaactgtcactgggacttgctggctttcctccaaaatactaaaagagctatatccaaggggaaggtaaatggatggctaacatgagatgggagttaagatttacatggaagacgaagcaactgattcactcaacacatctacccatccacccagccaaccctccatccatctacccatccatccatccatccattgaaagacttattcatctatccatccaaaaacctatccatccaaaacccatccacccatccatccatccatccatccatccatccatccatccacccacccattcatccatccaaaaacatatccatccatccaaacacccatccattcatccatccatatatccctcatctgttcatctcattcttctagccatcccaaacccatccattcaaaaactcatccatccatccacccatccatccaaccaaaaacccatccatccaaccaaaaacccatccatccaaccaaaaacccatccatccatccatccattcaaaaattcatccattcaaaaatgtatccatccatccaaaaatccatccatccatccatccatccaaaaatgtatccatccatccaaaaatccatccatccatccatccacccaaaaacgtacccatccatccaaaaatccatccatccgcccacccacccatcaacaacccaaaaacccatcctttcatccaatatgtattagacactaattatatactccagatgctttagggttaggaataagtaaacaaagtaaatagctcagaattacaggctatacttttatgtactcaaggtggccttggttaaacacagagcacaagggcattagagaatcatacatctgcacaaatgtcttagctcgatattcaaagcccaggttaaccaagccccactttaccttctatgttttattgtccactgccccctccacacacagagatgctagtcttccctgataactttcctttgatcttgccttgattgatgctgtttcttccattttacatatcatgcttggtcttttcacattcccctccctgtcctccaaggtcctgctcattccatgtcccccaggaagtcctttctcacctgtctcattgaaagtgatctctttaatttctgtgatgagacaatgaatggaaaagtcccctctaaactctaaagcctacagaaatataagaaattatcagcatcattgtatatctcttctggcatttatctcttgtagttttagagtcgctgatcctgtgcataaattctctttccatatacactacaggagcatttcttacctctgtgccctttgcatggcctggcatgacaactgtactcagtaacttctggtccaattcttttagtttggatggcgctgcttaggctaagaaccaacaaagaccaagggtcacttcaggtagaagtttccaccaccttcctcaacggctctcgaatgctgggctgagaagtcccacgtgctctctgacttcccatgcatctcttcattcctcattcccacgtcacagaacagagacactccagtaagaaccagggccaccagggtatctcagttctggcgaagttcctcatcttatgaccacaaggaaaacttggagagaagatgttcccagtgacctcagaaaagtttagccctaccctttctgcactgagcacctgcatggtagccaccatgactaagtgaccttcttaaggtctgtagcactgcctgcattgagccaggactgatccagcattcagccagcattgacacagtattcagccaacactcagcgaattctcatccaggactcagccagcacttagccaacactcagctagcactcagccagcactgacccaacactcacctagcactcagccaggactcagccagccctgacccagcactcagccagcggcactcagtcagcacttagccagtactcagcactcactcagcactcaacaagcactcactcagtattgacccagctctcagttaacatgcacccaggcctcactagtgtgcatgtgaacactgtttggatggacagtgaaaaaatcattctagcctgcttgaaggaacaaaggtaatggtcaaatgtttcaatttttaaataattttgactgacatatacatgcctacagatttcaacctcatgtctatatattaaaacagcttttctccaaccaatatataatctattgactggttggcatcacaatatatgtttcctcttaagtatcccatctcacatttttatattgacacttatatagtctgagttgggtgtttcttatgctagatcaggaacccttaacaccttaccatccatcacaaggaagagagacagaaaagagagagagaaaagaaacaatataataatgagaacagcactctcactaactggttcatgccttgcttgccttcttgtggagaataattttgtagtatatatcaaaattgaaaatatctacactctgacccagatagcaatctttactacaaaaacattcatacatcatacatagcccctcaacaataacaaaaaaacccctctatgattaagggtgttctcatcagtatttcttagaataccaaagaagtgaataaacaaactaaagtatacccatatcatgaaatactatgcagcaactcacaaggacgataagacagagataccagtgtcagagaagatacggaacactggaactttccagtaccaactgttacaaccattttgaaaatctgtttgtcagtatctacgaaagctacacttacacatactctgtgtgacctggcaattctattcctagatctagacccattagatgtgcatatgtatttcatcaaaagacctgtacgctgatatcctttgatacgctattcacaacagcaaagcaactggaaaggattcaaatgtctaccaccagtagagtgaataaatacacagtgtcctgtccacatgctagagtgccatgccacagacaaaatcaactgttattcaaaacaacatgggaggatcacagcaacaaaatattttatgaattcatttatgtaaatttcaaaatcaggcaaagctcacctgtggtgttaaaagtcaggacagcagttaccctttggaggtggtggctggggaagggctgtggaaatcctggaacacgaaatgttctgcctctggacctgggccctggaggcacaggtgtgttcacctggggaaaattccacctacacttatattcgtatgctggcctttttgtatgttattctgcataaaaaggttctttaataataatttcaactttggggttcagggggtacaggtacaggtttattacatggccatattgtgtgatgctgaggtttgggctatgatggatcccatcaccccagtagtgagcatgatatctaacaggtggtttttcagcccttgcccctcgctttcccccactcccatctagtaggccccagtgtccactgttcccatctttatggccatgtgtacccaactgcttacaaagtttaaaaataatgataattctctaatttctcatatgaggagatctctaagacatagcagaaggtaggaaaagaaaataagtctcacaaacacaaacatgggtctctgttttctgagcaagtttgtgtgtgtgtgattgtatgtgggcacccagtgaaataatcctggcctggatattagcagctgtcctgcagatggaggaggcagatactgttgtggggaatggcatggagagaggaaggggaggaaacgggtgcccttctgcaccgtctggaatgttcacaagcacaccttcatgaagtgctggaagtgctgtgaattttttttttttttttttttttttgagacgaagttttgctcttgttgcccaggctggagtccagtggtgtgatctcggctcactgcaacctctgcctcccgggttcaagcgattctcctgcctcagcctcccgagtagctgggattaaaggtgcccgccaccatgcctggctaattttttgtatttttagtagagacagggtttcaccatgttagccaggctggtcttaaactcctgacctcaggtgatctgcccgcctcagcctcccaaagtgctgggattacaggcgtgggccaccttgcccagttagtactgtgtcattttgaaagttataaaggaatttttatttgtagcatgcacctcctgtgtgtcaggctctatactgggcaccgtcagcctagaagacacagtgcctggtcccagggagtgggcatttggggctgcatgcctgggagtcagtggagagtgggttctggcactgggggtcagtcacaaaggaacaggggcctcaggtgccagctccacagaatgccaaagggcctgggacagctctccagcctctcacctttgctctcttccgtggcagcattctcagcattctaggtgaaagtgtcacccacagtgacaacaaactatgggaaaacagagacataggcaaactatgtgctgcagtcctaattttgacctcagtgggagcgggaggtgggaggctggaagggtgttgggaaatacccaaagcatccagggggcatagcacccctaaccacaggcagggtcttgtcccccattgtgggaatcagcgggtttcaggtctgtcccttcctttcaggttcaggcttgttgttcgaggccaactgcctcctccactgggcacagttctcagctccccgcatcccctcagaggatccctcctgcggatcacgtcgccagcattcccaggtccctgtggtggactactcggggtaggcgtctgtgtggcaggcaggacaatggagacagatgtgcagtgagacctctctgggccccacccttctgctgtgaagactgaataagataactaccaagagtaagggtagcttattcccttcctgtctcttttttttgcccattcctaagaactgcagaaagttctacaacctcgattttctaattttttattttttttaagagacaaggtcttgttccattgcccacgcaggagtactgtggtgtgatcatggctcacctgcagccttgaactgatcctcgtgcctcagcctcccaagtagctgggactacaggtgcacaccaccacgcctagctgatttttaatattttttttgtagagtcagggtctagctatgttgcccaggctggtcttgaactcctggccttcaactcctcagcccctcaaagcagtgggattacaggcatgaggtgatgcacttggcctgaactttctgcttctaatgcaagtgctctagaaacacacaggcttggagaggacactcaaaataaaccaggataggtacaacccccacccatttcagctgccacttgcttccctggccatccctgccctaatgcgtactcacaggtccagtggttatgctcctaaaacccagctgtgaaatgctcaccctctgcagagagacctgctactggatcagcagacatttcctgagaaagggtcagtgggccaccacctcgggcgcagggatagagctgtatggagctcctgcggcctcctaggtcacctgtcactcctcaggaggtgctcacggacctgtgagatttgtgtctcttggcttcccttgcacccagggaaggccactctagggctgctcatgtgaccaggagcatttcacctcccacaacccagctgatgtgtcacatgaccaagagctttgctgtccccgccatccaaagcccattcttctcacctctgcatccccatagccctgcagaaaccctacagctaggcagtccctttttcccagtgggctgggtaggcaagggggtcccagccctccccatacagagcagagggagggctctgcacaagccagatactcagtcaatttctttgaattaaatcaaacttttaaattaaaagttgaccccatagaagagccgacttcatgcttgttctttttgtttgtttgttttgttccatttccttgagacacttcggcaccaagcagcatttccgtaaagaattaaaagcccagaaccaattgtggatgcacagaagcctcccatctacctgcagcagtactgtctgggaacggtcctggcccattttgtggggccttgcactcctgggggtaccttctgcacatgatcgctgcccagctataaaccagcccgagaaggagcgagagccgtccatgggctccatgtcatggatgaagagactgacgcttagagagacagagaataggggatgaggacacagaacgaggactggaattgggaaaaaaaagcagccagggcttttactgctggatctcactgcctgtctccagaatacacgtttaaaatgtactacttaagagtgaagaaaccgagagaaggtctcctgattctttaaaagcgtgacacacagctgggcacggtggctcatgcctataatcccagcactctgggaggccgaggtgggtggaccacctgaggttaggagttcgagtccagcctggccaacatggagaaaccctgtctctactaaaggtacgaaaattagccgggcgtggtagcgggcgcctgtagtcccagctactggggaggctaaggcaggagaattgcttgagccccaagggcggaggttgcagtaagccgggatttcaccactgcactccagcctgggtgacagggcgagactccatctcaaaaaaaagtgtgacacacaaccgcatggcgactctctctgaccggaaaggacagtaggctggagtccggccacgccaccttggcaaggtgtgcttggtgagtctgttcatctctcagcctcagtctccccacttgaaaaatgggacaatatcatcacctcccttggagggcacggggagacacaaactatgcaaggtagataaagcaagaaatgtcacacgtgtagcaagggtgcccagaaccctctgctggtcgcaattgtgggatgcgggtgtttttcttcttgatcaagagggaaagtcatttttatttaatctgaaaatacaaatagaagggccgctttctggatgtagcaaagcctgaaagtccatgaacaccctgtgacaaggttatggggtgcaggggagaagtcgggccctgggtcagcatcccttgaccatcatggattaatctgcctgtgctccaaaggtccccgtgtccacacatagcaagggggctcaaacgctgccttacagctgtaagactcctactgtgcaaagttctcaggaccaaaaagaaaaattacttcgggggtctctcactgactgggtccgggacccaagtctctgaggctcagggcagccctctctgttggcagcctcttggaggggacagtaggaacactgtatcatcgccactgtgaacacagaatgtcacatgagcaaagacacttgtcaaatgcctttcctttacacgcaccctcaccatgacctgtgttaatgaagttaattgaatttaagatcaataatggttaattattgcaatttgacattcagagataaatggctttaagacagagaagtatgtgtgtatgtgtgagcacgcgagagagtgtgtgtgtgtgtgtgaattctctccaaagaaggtgaatgcattacaagcctaagagggatcccacaagccttccattgattctggtacattgtgatcgacttcatcctctgataaatgtgggcttttcagagctacaggtaaatgttctacgagactactctaacccttgtcactggccaaatctatacgtgctgtacaccagaaatctattgagatagattaaagaactgctgtagaaacaagagcagcttcaataaaggtgaaggtttattatattgactattaatgtaacttaactgtatgcagttatgaatgcttatagatcagggcagtttaatttggggcagttggatatgattataattgaacacaaattttttttatatcaccatagatgaactcaattcaatgtggacaaaaagaaaaaaccaacctagcttggaaagtagctaggttataaccaaagggtgaattcctagggagggatggccccaggagagctggcccaggtccaggcctctctaacgatgcactcgccgcaccacctcctgctccaggtcccacagcgtgcatggagctgacgccccagcagtctacagtggccccacaagcctggggtcagggctgctaagtggctcctctgatttgatccaaattggtaagaagtttaattttcaggagagattctcggtaggaagtcacagccccaaatgcattaataatgacactcctccatccacccagaaccagctagatgaccacttacaagattgataatgacaaagtaaatgttgtcaggaagaaagtcctactgattgcggagcactgacaataccgtgcgcctgaggagttctgtcaaaatgtaagattatgcaaaaacaccgttgagaacactgctaatcatctgcttgtgtcaattacttgaagggtctctgacagcatatttacattaaacacatttcaggagcaaaatccttaatgctatatcagaatatttttcattaccattagcaaatctttaaaaatcgttttttcccccctcggctacaataggagtgatggtgagacagggaaggctgggtgggggcctatgtgggtggagtggattgcgggggatttcagttcatccctctgcaaagaagcgggtggtgcagactcagagatggggcatccccaccacgtctccctctcagggcagatgacagggccctctctcatcccaaacaccttccaagcccagtgaacagcagcattggttttcttcctgttggtgtagccagccccacacatctaatgccaggctatttaacagagcaaatgacaggtgtacagaggcaattattgaaattaaaacttagatgacatctgctggggctgtgcactcaaacacctcgccctggtcacgccgtcttgtccacaattatggcaacatggacataaccaaaataaacagcccagggcctgcagtggctgggctgcctgagacatgcctgcgggaaggcactggccctgtgctgggcatcgtcatagagcaggagacaccccggcaaagggattccgcaaggtccaccctcaggcctcccatggcaggtcagagagggtcgggtcagaaggtgtctgaggtgcttggaaaaatacatccggatttttccggacatgtttgccagacatgacaatcatacttaccatggtgatgatggcagccagcatgcttcgatttttaaaatgtttgagcactctgctgtacgttttacctatgctgcctttggtaaggcacaccaaaggcccctcatacccaccccatgaggtccacaggtggagacactgtgtcccagatacacgtctgatgaagtggaaaaccggcatttgaactcaggtccctaggcgcctgttacattccacaccctggacatcttagttctaatgcttgtgagctggccctccaagatcccagcccagtcagcacctgaagacattccttacactcagaaacgcaggcaaaggggcccttacataaagtttgtaaagccccagcaccaccttaatgtggcaaaagagagagccatggtgctgagccatctgagactgccactcacagggcctctccaggtctagggtgcacaggagtgacccctcagtgcatgagctgctgccaacacttcccaagggctcagaggcccggagctgaccctccgcccttgtgatccgtgccctggaaacatagagccacagactctgcccatgtccaggaagaaagacagcacggtgtgtgaatgggacataagactccacatcatctccaacctactcaataagaaatgcaccatacatgcaaaatcagaaagtactcacacctgttcataagtggccagcccaaggaatccagtacttgtggtcattttagaaatctgtgtaagttacatgaaaatttaaagcaaaatgcatttcttttaagaaattctatattctgaaagttttgttttctaaaatctgtctcttgccattccaaacatacagacatttcctcaactgacctttataagtgtgcttttacttttaccttaaaatacttaaaaactacacacatacaaaaatagatatgtctatatataaacacacacatatatatgcatttttcctatcagagtgtgtaggttaaaaaataatgcaaagatgccacattcatcctcaaattgcacttccatatgggaagtgagatgtatactgaggagaccacagttcaaaacaggagcatctggaagccaaagggtctagctcaataaggccaaaatttagggtggattcagcatggcccattgcttgcttggtggaaataagatgtcacaggtaaacaacgtggcttgagttcatctttagttttaatctagattacatgtacatgtatgtgtaaacatatacacatccttatgcttatccataaatgcataaacacacgcccatccacatatgcacaaatggacctctgaatgaatctgatagccctacagagtcatctttcaaatacgtttgaacaaacaactccaaacaaagctacaccaaatgaatgaatatactgggcaaaggtggcccaggctaatgggtggggttgacaacatcagattcctaacagccaagccttcactccggcaaatcgccccccatctctctgggaagagactgaagatggtggagctgctgacccgcaggcctgagtgttgtaaagggacctttctccactacgctaaggaatacgcccgggtctgcactgcgacattggtcgtgctgcaacacaggacagagacggcagcctctgagatggcatagacctggctcaccggagacgcacttggtccacataggcacccacagtcaccaaggtggagggctcagctcatgatggcatggaccacttgacctgcacggggcctgcacagggcccatctggcacctgaccatctcggtggggtggctgagtggacggaatcactcaagcatgaggcacagaatcactcaggagtctggtgggtgctggtacaggctctcatgccccgaccccgccccatcttcctctctcctctgttggcatttcttcccagcaaggtgtcaaggcctcacaggccagatttctaaaaccccaaagcccacaagtgacaaagggcactggcaaaaagatggcacccgctggctgcactgtcatgggatgagccatcggctggtgccagcagaagcacatgggtctcagaaagacggatttttttgcaaagattttattttattcaaaataaatgctagctaccatttggtgacatggatcctgactagggccaagtgctattccagggccttcccagcactaacccacacaccctccacaaggacttcatgaagtcctcactcttttttttattttcattttttttttttgagatggagtcttgctctgtcatccagcctggagtgcaatagtgccatcttggctcactgcaacctccgcctcccgggttcaagtgattgttttgcctcagcctcctgagtagctgggattacaggcgcgcaccaccacgcccagctaatttttgtatttttagtagagacggggtttcaccatgttggtcaagctggtctcgaacttctgacctcgtgatctgcctgcctcggcctcccaaagtgttgggattacaggcttgagtcacggcgcccagtccgaagtgctcactcttacaatttgcctttcacagttgaggactctcagaaacttgctcaaggggactgggcaagcagggccaggactgaggcctcactgtatgcctgtggcccccacacccataactcttcctctccacctttctgggggccctgcctctccctctgcatcttcagctgtttagaaaaagaatctcccttccccaaactgtcaaactgggaccataacaacaacaacaacaaaaaattaatcttgagtttttaaaatatcaaaacctgaaaatgtataattaaattaatcatcataaattactttttagcaccgagagttggatttatagtatcatttccaaacctctctgtgagatttaaatattttatagcatatgtgagttagagggaaaagtgtctgagggcttaaatattgctgcagagcagtagactttgacaaaaactatagcacaactgtttctaaggtagtttgtaaaaattatttatttccataccagttaattatgatgggagtctttgttgaatgcacaagcattaaaaaagtgctgatattttatgcatctttaactggagcgcgattccccgcagcgcactggtaactccttgacatttagcattcactcacagcaactgtaataaggggtttgattgcttcctttgcagacgcagtaatttaataactgtgatcagttgcataaatttactatacaaccatcttaagttagccacattaaaattaagcaaaattgtaatctgttgacagattattgctactgaacaattctactaaaagcatttcagattagcaagtgccacgagcatttgtgttttataagcttgtaaaaaaatacggcagcttcctctttccacatccccatctccagccaccccctctcctgccaccccctccacacacacaccacaaatctgactattaggcaatttcatgaaattctgtgctttctgttaaatcacctctgaactgttgatttcgttatttgaaatgtgtgtggtgaattctgctgtctggaaaggaaaaaaaaaaaaagccgcgtgtcagtttcttctttctttcttcccagtaatttcctttatgcaactttacatccattgcctttgaagggacaggaaacctcctagcatggacctcttctgaataaaatgatcagttccccagagcaaaggaaaagcactaatttcataccttagatggagaaaggtaaaaggtgcccggctccctctgagtgagatccctgcagcaggcatccttaattaaggagacaacagagaagccttcttgcttagttgctaaagaaccccttatggagtttgtggatagaaagagaagagggcacaagttccacaggcaggctttacctagagcatggtgataaagagaggaaaacagcgcccctgcccactctgtttagagcaaaatgggacccgcatctcctgcctggtgccctgtgagttgacttttcagagcaatgtttagccaagcaggcaagtcaggaataactgtttctgatacttcccagcaaatatctttaaccatctgtttacacttgccaaatatgcttccaagtttccaattttatcagtatataaaaagaatatctgtttttaaaaaaaatcgtaaatatcttgtgatgcatctttacataattcaagagaaattaaaaaaaaatttcacttgaaagccagcatgatcacagatttgtttaaactttcatttacatagaagtttggggtgggagccacaaaaagggggtaggcgcttttttggaatggtcaaatgtcaaagttgagtgccaggcggggagtgacgcacaggtgtgccctccccacgagacgacggcacacccaccgtgtgcgctcattcccggggtggccttgcatatgcagcctgtcacttcagatggagttgcggggcctctcccagacaggtgacgcggcgggctgggctgcgagcttccttcggagcgaggaccactactgagtgtgacaaattggatgggacttcactaccaaatttcctgccaagaggcctaacagtcaaatgtctatcttcttctcatcaccaagaagtgatgctacgactttgacatagtgtctccgttacttaaagatacagttaatgcaaagtgatcgcaaaacgtgaggtctgtaaaacttttaagagccaagcaaaggcggcttccatcattggctcttttatcttgagagggcacacgtgcacgtgcgtgggtgcgcatgtgcactcatgcatgggcgtgtgtgcgtatgtatgcgtgtgtgtgtatgtgtgtgtgtaaaaccagaattcctaccaggcagcacagaacctgggtctctgccattgccaccattacctgccattttttataacataatacactggagataccctgggctaggtttgtttgcttctaattataactaattatgcttctaaatatgttctttagggttacacgtgtataaaaatggaggtaggaagaaagaaaatgaatcaggattattaaaagaaagagaaacatactaattagttagctagtatactcatttcaatgtttaataatattttttaacattccagcatacgccgcagaattaaaaattaccacagcaccacctgtgcgtcccctgggacatgaagatttagagttctctcctgcagacttggagtcctcctttctaaatatttctttgactatttctttgtattccacctcattccacccccacaaattagaagccaaaaaaaaaaagatagtaaattttgttccccaccaaagccttgtaaataacatctctacaaagcccaacttaattacataactcaagtgcttgaggaaaaaaaaatgcatctattcccataattttggaagctgcctctacccgtttctatatgtgcagactgcactggctgtgtaaaaagccaagtgcccgccctgttctctcagcctgggtaggaaagagtgccattgtaccccttcattttttttttccatctgcttagtgctccccctccccatgttctgggaaggttctgggctttgtgtggcctacgatggggccaactgcatatggctggggagacgggaagatggagcggagctgagagtgtcaagaaatgcaggagtgatgacatgaggcccgaaccaccctctcacctggaaacagccccacctcctccacctgagcagcacgcggcacggggctggtgttccattaggaccccacaaataaaaccgcgtgatgaatggcaaagccaagggtgccccccaagcctcttgggctggctttcctcaaactccacttctgattgtgggtcagtcgtacacaaacaaagccttaacagaaatgttaccgaggaaataatagccatttccaatgataatacacaattttagcactgacgcttggctgatttaggtgttcggccaatgtgtcaagcagcctgccttccttaggcgggcctttaatgggtaactggcaggctctggcagccttatttctgttttagatttggtttgtcattgggtatccattacctgccattcatctttgatctctttggacaggcctgatcaaaagatgtcatttgacctactccacttggcagaaacttgtatgactctcataaaggggccaccccagctataaataaaatgacattattatttttctgtcctatcatgtagaagagacaattatgataatgcagtgtctgtcatcgggagcccagcaaattgctagctctcacgcaactgtttagctttcttatttgttttttgtctgttttcctccatttcaagttgaaaataaagcagaattgaaatccctaatgttctgcctcccactccaacagtctcggggctgcttcccatggcagtgacgtgcaggtgtggccagcagcttgtgtttgtcaatggtaggtggtggctatggctgtgctcgccaggcatgaacaatgggatcaagtttgtccttcatttaatgtttggaaaacaagctaatctctgaaattagaactgagagatattactgcaaatagataaaaatcatggcaagggtttattgtgtccttaatcaagtcataataagggaaaatgcgctggaacattcccccgacaggcaaaatagagacagctccggtgtcatcgccagggagcccacagcttggggacacaagggtccaattgtttgtcatcgtctccagcgtggaccaccactaagggctccatttctaggagactggctctcgatcctttttggaaatggaggtttcggagctctggggtttgcttccttcccaggtgttttaggctccacaggtacacaggggtagtgtgaagagactagggcagcacgttctccacccaccacgtgctgagaacctccacccaattgatgctcttgtctggaaagagagaaaaacagggacacaccgtctaagacccctgctgaaatcctggctgtgtctgctcagattcagatcatcctagagataaggaagtgactcctacagatgggcttcatttgaaatgagagaaaatgaggccccaaacagaggaaaggactgaccagaggcaccacgaggcgttcataacagagctgagaccagattccacgccgcctaactttttggtggggcccactcgccatgacaggccaccagcctgccgtcctccccaaggccggcccaggagctcagtcttctgtgagccagtgaccaccgtgctgttggcccccagggcctgcctacaatgcccagctgcctctgcaacatgggctgccttgagctttgcttggtgtgaagatgcacaccgtggtgttgcccgccaccccttgcagacacaatgccggaaggcatcgctttgtacggggccctgggttcaggacttgggggtccctatggtctctcagtgctgccatttacccacaggatatgggctaacccaccagggtgcgtgatgtaagagggtaggtggtaaaaggacagaaggatgaaagagagagagggagtagattcggaattccttgcctgaaggaggaacatggcctctagcaggcgtagatgggtggagccatatcttctgcaaaaaaaaaaggacaaaatactctacaggcgcaggaacccaagccagggcaagtcaatccccgcatggaatggagacatcagcattgaggctctctcagtataacatatgacactcatttgaggaagaacacattctcggcattgggaaccatcaagtcagcaagaacaaatattccagattagcacaggggtcaagaaaggcctggaaacaggccccgaactaagaaaccaaggtaggtaaatgaaacgtgcggataaagcatggtactttagtcatccaaacttgcaaagcattaaataatgtggcgcaaagaggaatgacggctcctaagactgttgcaggaatattattccctgaagactcagctggggcatctccactttcaggaagctgtcgccagctttctttcaccccctgggatggccacggcatccctctccatgttcccatcctgctcacggtcatttccatcatggtacccacgtcagaattacgtgcatctgagtctcatcctccacactccaacccccttgaggactgcctgtcttggtgtccctggcacctgccagcactggcttgagcaggtgcttaataaacatctgctcaaattgtttcaacacatactccagtagcctggtgccctcggaggaatttgtgatgatgggaaaatgcatgcaagtatgttttccttccttgagtttgagcgacatctccttcccatccctggaactgtggggcccattcattatgttgtcatgttgccccatctgctaagcctccactcggtgtctcaaccttctcatgtctcttccctactctggtcccaggtaatgagcctctttcctccaagctgcctctcaatggaccagaagtgaagatgaagagtcgagtgacccaaagcaaagagtgtggggcagattagaggagaaaaaccacagtcttccttcatcttcctaggaagatgtgagggtttgggggccattccacatgcatttccttttctttttggtgcagcaccgatcctgtgcactggtgtccagggtggtctgcaagtatctgctgcatggatgaatggatgaactcagggacccactgctcaggagagaatcccttccaccttcttaaaggagatgcagttccaccaatctatgacaagctggaggccacattcctccttcaggcacagaattcagaatgaatgcagggaaaggggtgggcagagtgcgggctctgtgtgatgcataagtcacaatgtgaaaggacactaggacctcacaggcctaggtccatcttctgttctgtcctgagccacagcaggacttgagcaagctacaaaacctctctacgtttctggttcttccctttaaaatgagaatgaaagtcctctcttttaagaattgttgttaatggaattatgcacataaagcacttagcaccatgcctggcatgtggcaagcattcagtaaagaacagttattttggggttacagaaattagaattttccatcagcaaggaagattcctgcagtgacaaggccaggatctctagggcgacatttcagcccctcactgggccccacccttgcagctggaaggatcatgcaatgtccaggaaactcctgcctgtgccatcagctcagcctcttgagaccaggaagggaggtggtgccacctggtaaggtggcagccaaaaggctttcagccacccaaaattctctctccgtctcaggccaagggtttcaccagtagcaagtcagacagactctgggctaagcactgccctgttttagatactcttataaaaagcagataaacttcaagcaagttgggatggaggggtctgaaggctgaagggggttattaatccacctaacactttggttgtggatttattcatcagcacttcccctatagcccactcacccccaacaaatcctaggacagatcaagagcattcgtgtctggggaggcaggagaagctgggaaagagagaaacaaaataggtgccaatgtgctgctgagctctggcctgcctcctgtcacaggaccttcttggggtgagtctcgcctgtggcctccgactgcacagggtttgttccttatgggaaggagacgtcttggtcctacggagtcctccagtacatgcagagatgaagcagaggacagaaggtgctgcactgtgaagggaacttgcccctctgcccagctcacgggctccatactgatcaatgctcagggggcatgggtggaacatgaggactggaagatgagaatcccgtttagggtccattcactgttagggtgagagatctttgagcagagccacccctctttatttgtttgtttatttttgagagagtctctctctgttgcccaggctggagtgcagtggcactatctcagctcactgcagcctccacctcccgggttcaagggactctcctgtctcagcctcctgagtagctgggactgcaggtgtgcgccaccacgcctggcaaatttttgtatttttagtagagatggggtttcaccatattggtcaggctggtctcgaactcctgacctccagtgatccgcccgcctcaacctcccaaagtgctcggattacaggtgtgagccactgcacccggccaagccactcctctttaaatcctggcttctccatgtcatggcctttgagtctcagtttccccatctgtaaaacaggcatggtgacaccaatgtttcccagggttgctaggagaggagcactggacaaaaagagtgttttgcaggctgctctgtgctgtgcacaccactgctgagaagaggcccatcttccctcccacggctggaaactatgaatcagcagatgctggcttaggtcagagaaataagcacagaaccacaaaagaaggatctagagctatgctgtccatggggctaatgactgtgttgtccatggggctatatatgtttaagttaattaaaattaaacaaaatgtaaagttcagatcctccattgcactcatcacacttccgatggggtagtcctatcggacagctcagggcagcaaattcccatcagagcaggacactccattgctggctggaggggacttctcctgttgcttcctgaaccccttggcttcctaatgtcctctctcttcctctttagaaaagacactttcctacagaaacagttattaacccttttggggctttcagggcccctttgggaagttaatcgaagtcagtgttcgctgaaatccagaatctttcagagtgtgggaggagttccaccggtggtacaagaaaatatgaggtggttcatcttgaatcacacggtaataaattactcccttgtcagttccatctttttccctctgattgcttcaaggagaaagtatccggtgggtgctattggtctttaacacctccccaacacttgctaatccccctttttaaagaagagagataaggcattagactccggtaggaaggcaagagaattcagctaggatttaatgacattgtttgatttcacggcgtttatttttatggttattttccctttatggcaagtgattctgggtcttcatttataggagtgacacactttccttttaaaaataaatttatttgagttaaaacgtgtgtaaacagtaagttcaggcagtgcatgtggtatgcagaaacgtcaaacagcatgacaggtttgggactcaggatgccaaacctgcttgggggcaaggaacagtcacagaggcttccagaggagactctgcgggaagccccaggtgagggctttgctctgctaccagcgtttgctgttagcatttccacacccgagatttggaagggaatttgtcaggtttctattaaaacctctgaatgtccagttggaggaggtagtggttattaaacctcaatgttcataaatatgctaataaaaatgtaaaatttgcagtgagccattatcaatcacagacaggatgctccacctttgaacgatggcccccatgcctggctgctgaccgggagctggaagccaagtgtgcaccgctggagggcagcgaggagtctgagctacatgcctgccacgtgcggatgtgggcacctggcagggactagggtggccacgctcctggcactgcgtaccacctgcctgttgggctgcggaaatggttcctgtccccacacatatgccagtgcctctgtgagggtgaggcccatccacctctcccagacacccaggaaacaggcagcgacatgtgacatgtgaattcaccctgagtttggacagattggtgagagtcccctgaacaacgaaatgcatggccgtagccattcagcaaacgagaaggatcctgggacttgaaggatccctgctccttgccctagaaaggccccatcggagccaagcctttcatagccatgcactaccagaagtggggtattatcgagaagggtatggcactgagagtccgggtacctgcatcctggcaccgacactcacttaccaggctgcaacctgcagcacacaattggaagtctttgcgccacagaatttcacttgtaaatcaggtaataccttcatctcgggtaatgacggtgagcctttctctctgcctgcttcccaggtccacatttgggaaaggcaggtcagaccccctcgtgcctgcctctcgagtggctgttgggctcaccggatgcaattggaagatgcttggtggatgatgatgacatgatgacacagggttgcctcccttgtcccctagacaaccagaaaggatgcctccttccggcttctaaggccaggactagaggccttctttccctacagtctgcacgagagatgctgaggccaggccccagccatgccagcctcctttgccaagcactgctacatgcaggcaagggtgtttccagagccatgggagagagagcgggcggcagggaggcatggtcggccatcactgcaatcctgagaagccacatgggcagcggccggaaccgtgtctcacctgcacggtggggctctgcctgcacccctgcttctgcacaagtccatcccagctatctggctgctcacctccttctgcccaaccttctcagggccgggtttctgatgcattgtgaatcatttctaatgacaggatttcacatccccttgtgatactacattcttgtgcataacttgtaatttgagtgattgtgaattgttccgagtgccagattcgtattttgcaatagatcagggttttattcatatgtgagtgcataattttgcctcaagatgcgttagattacattaattaactttgtagccagaatgggagaaattaaccgtttggatgaaccttgctctgtaatcaccgtcattctcagaccccttgagtgtccacctccggggctgtctggaagagcaggcagtgaaataaaaagaaggggaaggaatttgggggcacagctccaggggaaggctcagctcatggcccctgggagaagccaggctcctgagacactggaggtgcttacctctatgagaaaggacgacgggtcctatatccctctgtgtgtttcttctaaactctacagatgcgtgctggacagatagagagcatgggatgtaatcccaagcagggaatcctgccaccaggggttgctgcactggacacttctgtcctgggcacagatcaagggaagaaagcaactctgccaagagatgtctatcacctatgctctccccgagcggccagcagaaatgtatgagctacctggaacagatgctgaaaggcgcattatttggaatatgaccaatccaactttcctttcatgatatttattttttgtttctttttcttttctctttccccttctccttcgaggctcacatcagccatccaatttactgacagtattgacctcttatagaggagattcccccagccccgccctgtcccaaagcgtccccggtctgttcatcacttgggactgataagtccatttctcctccaaagggtggagcttggctgggggtactcaggaagctctactcctgggggcggggtgctggatactgccaggtggcaggacacatcatatcagagccaggccaggccgcagcagtggggcccctcctgccctctgccagggagctgggtgtgtgcgccctagacttccctcactcgccacccagcttggatgggcaaagcactaaaaggtaaatatgagaaatacaattggaattatgataaacagaaataaaaaggggctaaaatcagaaaggttttgtgaaaagaaaaacggctggcaataaagctgaaaacagcagtgctccgaggcaatttagactgcaaaacacaaaccattaagtttgtgcattatcttttaatttaatcttgaatgatttataatccatcacgcaaggcttcaaccatatccaattattctctgctgcttgattgacaagaaaggtgatttattaagctaataaaaagtgatgtgagctgagctcatataaaaaataaccagccggacaaagactttaaagagacatcgaccatttttttttcccacagagaagggtttagtcacttttacccattcagcactaatcaagtagcaacttgggagagagtggcaaggtgtaataattactgctatataaaactagacttgcacttcgggtgggtgtgtaaggagaaggaaataaatattaaaacagatagaagaagtctgacgcccctaagagagtccaaaatgcaggaggatctcaaagtcttcagtgatgaaagcagcaccaacaccagcagctttgttttcagggagggaggcaggagttccctgctacttaaaatgcctttcccattttccagggggaaatctgcctaaatctcccaaagcctgtttgtgagaactccattgtgttttctgcagcagtaacactggaatgcttgtatgcatgaattaaaggggaagacggcacctctaaagtcatctcctgtaattgtttacctaatgctgctcggagactctggggaaaaggcaggtttgcaagatgaagtggtgtgtacgaggcctctcctcatacacaacaggatgccactttaatgtccaagatgctggcgtgtttcagtgagcacagcacttcaggactaatgatgcaatcaagcctcttgcaatcaaacagcctgggctggggaaatagtgctatttgcggcagccgctgtgtcgtgtactaaaattttctggaacagagaggaaataagaaagtaaaaaagcaaaattctaaattttcatgggggagaggaggggctgttagggaaggaaatgttcaagtgtctgctttccacctcatggaaaagtgggaaaagcagagagggaaagaatggggagagagagagagaaggagaaacaggcagagagagacagaagccaacccccgccccacctcagctcactgtacgctgtgtcactgaacagtctttctagtcgttttcccgttttatttctcaattatttgagtcacatatgctccggccaaatattctctgcttgcttttattttctactgcaacccatattacctacagtatattaagcaatctataagggcctggcaccttctatcaatttgaagaagatgatgccaatgatttgcagaggaattacaacaaagaaaggaccacgggagttgaaatttagtcgcaggagacttttttccagggacaaaattctcttctccaggatttttttcatccgtcaacaaaatccaacgggtttttctttttaccagcctccctcccctccagctctctgggcatgcccccagccccagccccagccagagccacagctgcctaggagggaagcattaaaacgctgatatgctgtagtttaatgccccagccatctctgggcagctgttccagccgagccatgccagggccagggtgtgacccactgcagccacatcgggacgatggggatgctgaacagtgcaggctcttgatggggcaagatgcaaagagctgggggaccctggctgcaccatacaacccaggacctgccagggattcagaagctccctgtgatgtctcctggtccttatgtcctcaccccaaatttactgccacactgaccctactggccaagcacagcaaggatcacagaaggcctaaggaactccctgctcagactcaagacaaaggaaggaaacaggctgtgtaattaaggtgcaccaagccaggtgtgaggagaacagcagggtctggagagcagggcgcatccccagactggctgcagctgtcccaaacgcctgccccgctgctcccaagaaggggcggcttgtcatcatgcttggctttcattaactttccttccggaaatctgacccggacatccggggtggaaagcatacagaatcaaacttcatttataaacttttccctctgcatctctttcacgcctgggtcccaggtgaccacggagctcctccaggcacctcccacccctggtaaaagggcccagccgtattgactcatttgtgtgtgaacattcggctgcaggactgtaaaagctccctttaccaaaatcaattcaaagattcaaaacaatctattgaagagttttgcagctagcttttaaaccacttataaaagacaacacacaggaaaaattaacccctgtggctctattaggaacagtataataaatatacatttaaaagatctataaacacatatttatctgcaaaatgttcttgcataaaactgttattgaaaaggctttcattttatctttgtgttattgtaattttattgaattgcttattcattctttgatattgtattttaatggtattataaatctgttttatgtctgataggagcctcattgtaaactgatataacagataatatggcaattcaccataaaaattctaaaccaaaaatgcagatcggaacgcaaagaagcactttaattcattctcggtttcttttcattttattttttaattatttttcatgtgctggttgccatctgttgataaaggatggttgtgtgaaactcactgtacaacacaataggaacttttttgtataattctattcataaaaaatgataacagtataaaagcattacacttctctagactgaggatcattagcaagttcattgtataaactgatttaaattagtcacttctggaacaaaatcctttttttgtaaaatatcttattttgggtaatttttagtatcatgaataaaagaacaaaaaaaaccactttctaaaatgtctcctattatttttatccttttattaaaaacaatgaaaaacaattatgataaaagatggtatcaacatgtatagcaattatgtcataagcccaactatggctcagaaacttcgcaggaagttcattcaataaaagtatcttaacttgccatctctaaatgatgagatttccattatcaggaacaaacgatccggtcaccaatactgtggcaaacacctagtcccaagagcagggctttatagcagctctggtgcctcctcatgggctcctcccatggcccagacaatcctaccaccctggtgccatggctaaaagcagctcattaatctcagctctgtctgatcaaggatcctctgagccggagaccagggacctgagaagttgcttttcctgggtgagtacatctgaatataaaaagcaggcgtcaaaactgtctcctgttaaaagccacctagttcattcccctatagagaaaaacaacaggacttaaggaaagtgtggatccccacctcacaacttagcaacactgcagaaacaagcaggctatgaatagcacctgccaagacggctggctcagctgcagataaaaagaagaacgttgtcaacacaaaagccttctattacaaaatagagaaaagtaggttttccttctttaagaattttgcacataaatcattgtttccaataaacattgtaaaggtttcatcagtaattttttttaaaaaaagctactcatatatatgaagatcacttggtgagacacaaacaattaagccacactgaagaagtgaaaatggctgaaaccctaaggtgagcatatccaggtctgcacagcaaaacccagccacaacctgggcttctcccctgagccccagcccaccactgagggagactgatgtctctgcaggactgagaggcaggccctgaggaaacccgggctcacccaccatgagctcatagcccctcaaagcatcaccaggcagaaagtttctactagaacactgaagagggacaaataaccaccatgacaacggtaatcacaaagaaaacaacagtgtaacaccttttgtcgccctcaaaagcacaaacatcactgaaacaagttttctttctacttaagctgctttgaaaaaaaaaggctgctactaggggcaggaaggcaggcttcattagctgaatgacatatatggactcttaagatgcagcccccctgagaaagtagcaatcggcccttccttcctaattctttccaacacacacgcagttgatagaagtgatggagagtttcttgccaaatcatcctaaactaggacgtaaccgctacagcctggctcaaaaaccagagcttagagctgcagatgacctgacgtattagggagctcacaccctgaaacattttctcgggttacatctgatctatacagaaacagatgaaatatacatgtaggttcttaagtataataaccaaacaaatgcctgtgaacaaggacccaacttgagaatgacaacatgaccacggggcttctccaccgctcaggcaggcggtgggtaaatatgaccctggacatgaatgcgtgacccccaagcaatactaggctcgtgtttgcttctgtgctttgtagaaaagacggatcctggacgtagtcctttttgacttgctttatctacccatataatatcactaagatccatccctgctgttgcccgtggctgccgttccttcatttttactgctctaaaatattccattgtgtgaatgttatttatttaaccttaaagaaaatgtctttctgagacgtgacacctggagtgacaggtgtgttctgtgctctgggcccacctgcgagggatgataactgcagttgtcctcgggttgggggccacatgttttatgatgtgtccttctcgggagaagggacatgttcaggatgatctgagtaactgacctctccctggacctaagcctttgaaggttgttgtagttaagacacggtcaggtgcgggtccaagagacagcactaatggccactgcgcctgagtctgcagtgcacccaggctgcagggaggaagtaaccaggaggctgaagtctccttggctcttggtcccttccactaagacatcctggcttcagctgtaggtctgggtgttcctgggagaatatctgtatctctggttgcaggatgtcactgagtcctgcgcagtgttcaattctgagatgactgaaggagaaggaggcagaattcccttccctacgggtcctgctgagatgttagcaggtgtcaggacaggtcatccggcccagagcctcaagatccatcgtccacagaagatctgcttcacatttttaaaatcatagcttggcaactgtcaatacattgtctcccactttgcaatacataaagaatgtaaaactgtgtcctgttgaaggatggcagtgataccatgcaagcaaaatacagtgctttataattttttttccagcatccctttccaccaaggcctggccagctccttaatgtctaagttcatcctctgaacctgatgaatcaatcattccaaggtggaggtgggtaatgacagtgctgagaaggccatggctctcacttaaggctgacatgggagacaggcagggctggacgctgctcactggcccgccaatcggagctctaccttccaacttcacagtgcccctaggacatgcccggtggcgtcatcacatggctcaccactgaagcactccagagaccgttccccgttgtttttaactgcccacctagcaagtgcatttctggttactcttatgaaatctaaacatggagcctacagctctgcctgaaacctcatggaaacacaccaaggtgtctgcatacggcagactcacgccaggttaacgcaaggggcctggccacaatcaggcagcaaggtcaaaagcacctgacactaatgatgtatcctcgtttccccacaacagcaggcccgacgtggacagcagtactttccatccagactgtgtgtgagacagagggagtgagccagagttgaggccaggagagaaagaaggtagtgcttaattgtcgttgattacatatttattaaatatatatttttatatatattatgtatgagtaaacgcatttccttgaagatgttttttctttttctttttttttatactttaagttctggggtacatgtgcagaacgtgcatgtttgttacataggtatacacgtaccatggtggttttctgtacccatcaacccatcacctacattaggtattgctcctaatgctatccttctccattccccctacccccaaaaaggccccggtgtgtgatgttcccctccctgtgtccatatgttctcattgttcaactcccacttatgagtgagaacacgcagtgtttggttttctgttcttgtgttagtttgctaagaataatggttttatgtttgtttgtttttttttgtttttctcagacggagtcttgctctgtcacccaggctggagtgcagtggcacaatcttggcctattgcaatctctatctcctgggttcaaacgattttcgtgcctcggcctcccaagtatctgggattacaggttcccggccaacacacctggcaaatttttgtattttaagtagagacagggtttcaccatgttggctgggttggtctcaaactcctgcctttgcctcccaaagtgctgggattacaggcgtgagcccccgtgcctagccttatgtatgtatttttttttagagactaggtctcactctgacatccaggctgcaatgcagtggtgcaatcatagcttactataggcatgaactcctgggctcaagggattctcccatctcagcctcccaagtagctgaaactacagatgcatgctaccatgcccagctaacttttaatgttttgtagagaccaggtctcactatgttgcccaggctggtctcgaactgctagcctcaagcgatcctcctgcctcggcctcccaaagtgctaggattacaggcatgggccaccatccccagccagtacttactttttgaatggatgaatgagtgaaggaataaattagtgatggacataataaaggaatgagtgaatgaatgaatgaatgagtgacagaacgaatgaatgactgaataaatgaaactaattatttagttaccttcttcccagccacaaagctctctgatacaagataacatcaacatcaaggattagcaatatatgtctattgatgaaaatttggaaaataaaggcatatagaagaaagcagaaaaataaaaacccttacattttggagtgcttattccttttattttccctttataatgtgtgcatgtgtgtgaatgtgttgggttggtattgtatttggcaacctgcttttttcacgcaacattgggtcaagagcatttctctcacatgaaaatgttttaaaccagccttctgctatcaaatgctgagataacctcaaaggagtggaagtccatacagccagacaccaaaggccaggcctccctcttccagccaggagctgcccaactcacccaggagcatgctgccaccgtagatccctgagttccacagagtagcctatgatcatgaacttcactgcatggcattcagcactctttactattcaatggtttgggggcctttaaaaatcagaaagcaaatgctatgatccaatggtgagctcccgtaaataggtttaattgtaaaacatcacatttattccagatgtgaagacacatgagttttgccatttaagtagaaagacaaagcataattctatcaatgcatatttttccttttcttttctttatctttgttgtgggttttgttgttcacctctacacagcttcattgtcaaagaactctaccaagtgggagcactggatttacctctgctctcagtgatgcggctggtttacgaatacccagatgatttcacatttgtagacccaggataaactttaagaaatgtccacatctagaccaggaagaagttggcttcaggtgcagatacatcagggtagacccaccacagtctcccacacagtcaccccatccacaatcaccttcccacactgccacacacctcagaaagatgttttctcccaggtggtaaagacagcagctgctgctcttgtacttgaacctggcctccaacacacacacacacacacacacacacacacacacacacacacacacacacacacagtgcattgcaggataggcagcctagggcatccctttgcatgtggggctaccctcattcaaggcatcaccgagggctcagggatcagaagccacgaggggcatcttcacaaccaaaagcaggaggaaaaaacgtctccgcagcacccaatttgatgctggctctccgcccctacatcaacttgcacagccaagccctcaaggctgtgcacactgggccagcctaccatcagtagagcaggaaaccaagctactagagaggcaaccaaggttgttttgaaagcgttattattatcattatgattttaatgtagtagacttgtgagttttccatcattataaatccagtctgaattttcatttttaacgtttacaatttgactattcagaatgaaatcttaagcagcaaagtttggaacaagatgaatactgccagttgacttacacctcccgcatataaacaattgtgtcaagttaggaaaactaatataatttatgtaaatatcctgatttctttgatatcaacataacacgatgaaggcttcaaattcagacacaagtttccaacactgcagcattgagacagctttccttcaagcaccttccaaacccaaaagaatgggcaaggggcgtgaagcctgaatgggaagtgacttaccactgggttttaggtttggaggcctatggcctctggtatatggaacttccctgaaatctgccccaccagcattctgcaccaactctctgacacaacagtccctctgtctccactaccattgcttctaaaacaagggacaaccccacttagaaaggcaaagtatccttgcattatgtaggccaagtccagaggggaaaaccctttaaaattagagaatctctgggtatagtgattccatggaagcacagtgattttttttttattttttcaattccgtaagtggaaagtgaagaaaccattttcatatgagcatatttttctccaaggaacagttagaaaaatgctgatgtggtgtctcaatacgttttactacaatgccatcaattacataaaaacaaaattaagtcactgtttcaaaatccttaaatattattcagctaaaacccaaaaggacattttcagtattcctcggtcattatctaagaagctccgcgctgtagccagccacctccgctgtgctccgtaggaactaaacataggtagtatacgggcacagtgcctctgtgtcttggccgttgggctctctgagcgacctcaggtaatgaggatgcctatggagagggcttccgcagtccggccacagagccaggctttacaccctcagtgctttcactggtcgggaccggccagggaatgacatgtgaacttaggctggtctcagttttcccgtccatccaatgaggctgtccctgcagatgaatttaaaaggctgtgatcctatgaatttacctatttgctgtcacccagagactgaaataaaaaaggcaaagatgtctgagatgaatacagggattcatatgctttcatatccgtatccatttttgttgatgcatggaggcttctgggtgcctgctgagcgagagaaggggttgctgactgtgatgctgtcctacctaagcgctgacggccagagacatcacgcgcgcactcccacgcagctgtgggaagcgaaatgtgtgtgatctttttggagaacagtttggatatttatcattttgttaacctgaacataccttttcagctagcaattccgcctgtaggactgcatcccacaaggatgtaagtggaaggacattactatacaaaggcgtgtgcagaaggatgttcactatggtactgtttgtcaaagaaaagactagaagcaaccagaatgtccatgcagagggtaactcattcactagagtcaaacgtggcccttaaaaagtataaggcagctctgtgcaacaaaatatggtaggatatagcagctgaaacctaacatgatataagatgatgactgagatacatagatttgccaccattttattatgtacaatgtaatatacacagcaaagtttaaagaattttgcctgtacacccatcacctagtttaaaactttaacattccgctttatttgctttatcacatatatacccatcattccatgtatcttaacttttggatgcatgtcaaagtaaactgcagatatccaaagtatattcttagacaaaaacaggtacaacatggagtgtaaagtgtggatttctcatttaaaatatttaaaatatacttttaatttaatggcaaaactgcaattacttttgcaccaacataaatatctagaagactatactacaaactggtatcggtgcttgcccctagggagaagaactgaggagctggggttagaagaagactctcttttaactgcataccctttgattctcttgaatattgcattatggacatcattttgtttaatttaaagaatgacaatgcatccactttcatgagagaaagctactgtcaaatctttcagggctctaggtagcttctgtagagcagccctgcatgcttagaagcctggcgcgtgtgtgtgcatgtgcacacgtgcctgcgtgtgtctgtgtgtgcatgagcacgcgtacacacccacacccagatgctcggagcctgcacagtgagggtggtgctgacctcccctcatctatcgctgtaagtcactttctcatggggctgaaacctcggagtgtgaagcaaccatcttcaggaggctcattatttaatttccaagtaagcagctgcaaaagacagcatgtttgttgctgttagggagaacggagcacatggaagacaggagggaaaggcagttcctctgctcagggtagctctgcactgcgagtgcccatgtctcagtctcccttactgtaaacatttgtgcaacttcaaataaatatcctccccaagtctcacgcagccttcggctctgatggaaaccctatgtgtgccccagtgtgccagtgtgcacaggccagagaagcatgcaaatacaggggagaagtccagctccatgtgaggaacgccagagaaggcatcctggagagaagtgagcagtccagaatgtagactctccttccttacagcactcagccaggctactgaaaggcagcagctttctgtttcattaaaaaaaaaaccagcagaggagtaaaaagcccttagaaaaaacatagaattaaacatgatcatgagaacagtactgtaagccaaaccttcaaaggaaaaaagaatattccacggcattactggatgtgttcgaccaattcccttcttccctgagacctgtagctcgaggttctagactttgagcctctgggctaccgctgcacatttttgaacagcgatcaatttccttgtgtgttttaaaccctgggaatcatattctacatgtgagagatagtaaaatagattttaaaaattgaggtaactgaatatgtggagttatgtcaacatgtcagaataaatacctgaaatccttacttttctacatatgaaagggatctgatatctaatgagagggaaggaaaatgcactttgttagcattctgctttattcttgaaaacatgcatataaggctagttttaaaaatccctctgataagaataagactgtgagaacactgatttccactaggtgatacacatatgtaccatacatatacatacatatgtaagaatacatatatgtacacacaatacacgtatacacgcatataaatatacagtgtatatgtaactgagccaggcagtatacttaaaggcaataatatgatagtatgaaggcaatttgtatcttaccacatattgaaataaaacaccctgcacagcccctaaacctcaaaatccaatacacaaaatgaaacgaattgcactgggaaaaaaaataaagaaatgagaaaatgaactacgatattctcttatttgtttagtgttctctttctctagagtttacatggacattgtctctagttgcatctgcaaaccaatacatcggctgtcagatcactaaggcatttgacaacatcattctagagcctttagttactgagatatcaataattaaatgcattcagttcacactttgttcttgcagataccagctatttatctctgtcctctgaagaagctaatggtataatgggcaaaacatcaagaataattaagaaaaacgttgctacaaactctgtcagaagaaatataacttttgcccaggcccccagctagaattcatttatacaagatccacccaaaaccaaggcacctttgctgaaaagcgaagtgctaggctcatggagcagggaactcactcactctgtccacctgaggggaagaccagtgggcacttctctgagtgtgagccttgaaaagccttgggtgtgtgcatatagcatcagctataaaacagcggggactgcgggccacgttggcacctctcccacaccagggatgggctctggaaggccagcccaggctgacaaatggcagcaggactgacttgcttcagtggactggcccctgctgatggagcccaaccttcctgcaggccattcacctcccagctgagccatccatgtttcaaagcttgtttgcagcattagctggtaccaaaacagaagttctgagaacatcttattcaaggaatggcgggttaaatcttaacaggtctatttttctttagtagagagtgtctctctcctttcatatccaataacaaataagaagagagaaactgtgaggtgttttcttctttaggtaagggtcaggcctagatggtatataaactccaaacagattatattttaagttggtgacaattaattacaataccgtatacatactgcagataacacaatttaagattaaagaattatctggagccatagtaatgggagatgactttgaagaggcagccttccagataagccatgtcacatatctgcatatcctttcaaacatctttgtcacctaagcgggagtggctcccaatcactgttcaccaatctcacttgcggaagagttggtagtcaacttcctgtacaggggccgtgtgagctcctggatgtctaccttaaacttcaaagagccacatttacagaaaatgaaatgctcacatttcatcattaaattacactaggctcccaatcttcatgcggcacatgtattgcactgaaaacggatatttgttattaatgacaaagatatggaaaatgtgaagttgaaataagctacccaaacttaagagaaagaaatgttacaggaactgctttgtcaaccctaattgtgtaattacttcttggcttggtcacccaagctccgagcaagaaataagagacaatggtaatttcttactactgaaatgaaggtgtcacgctgccttgtgcattctgtgtaagcagggctaaagtttacatttatatcacgttacctccattacaatcatccaggccactgcaagaacttagtggtataaggtcagccctggcaatgggcacgctcaagtttacttgcacaaacatttaatttaggcagagtggaggcatctctgcttttggtcatcatcttacccctcacctcacaccggtgaaattggtgaactgctactggcaacttgcagactcacagcaataaaatagtgtttttaaatggtgctaatacagtggctaccaataaaaatgaaccactagatggctttagatttttcacttctgaatatcggaagatgcattatttatggtgtcaaagctaaacctgggtacagcacttgggagtgggggtgtttgtggagagagaggcaggaacaccgccctgtgtaactccatccctttctctcttcactccacagttccccttatagctcgataattaattacaaggccgcataattctatcttcagtcccatcagcgttgggtcaactaagagcaaggatcacatgccaaaattgttgtgtgttttttttccacaccaagtatgaaccactcctcattctaatggaaaaaagagcgcagacacacaactaggaagagaaaaaaatgaaattccattataactggtttcctcaagctccagcctaggatatgagtaatcataaaaactgtaatatcagcttttttgttttccttaacactgggttcctactttatttcctttcaaagagggtcaagatcctttttttttttttaattcataaaagctgctgtgtgataaccaaaaggttggtttctctctgtaatagctctgccttccgtgatacttttaaatttgggggcaaaaataaaactcgctaaactctcaacagctgccctgagtgaacttgaagcccctcacctgcctggccctcaggccttctggaaacatctaacgcctagcaggggtggagcagtgagctgaccggcaggcatggaccaggagctgctagcacaggcctcgggaggtggcctccgggctgcttggccgtaccttgaggactggcctgacggctcccaatgcccgagctcccatgtgaagtgcagggaggagcaggtcagtggccacagcagcctggcctggcctgggtcacaccctcggtcagcatcgccccaatgtcactctctagttctgttttctcctccctacccactcccaccttaaccagccacagggaatggcggggtgcaaaatggaggctgttgacctgctgtgtgatccacacctccctctgggctcaaaacatcaatgtgcttttaacaaggagccaagtgctgtttaatccttgggcggggggaggaaagtccagaacacctatgggtcatgaagcagcccacgctgagaaggcgaccccagaccccagacggaggtgtcaggagcttgttttcccagcacttcctgttggcagggtcacagctctaccgagagaaggtgggccgtaccccagggcacaggaatcagcattgacatgcccaaaaactgacatgcatgcttgtcccccacaggcacgggcatgtccccagtcaccatggtggcagaaggacaatgggaaacgcagggcctgccaggcaaattctagcaaagacgggcttcctaaaatctcccttctacatgagagctgcccaacccaacggcagagttatgactcaccgaaagggataccccctccttccctctaaggactgaaggagggaaacggcgcatgtaaccctggcctaagagagacccccgggctgaaccaaagcatcagagattcagagggcacgcggggaatgtggacagagcgacaccaggccttcctgagctcacctgtaccagagcctcaggaaacatgtctgtaaaaccgctctcatagtaagcactttattatctacttttggcgcagtgatgagttaaaggggcattaattttctttcatagcctggaatagcttatttatcattttttttgtctttgtcactgatatttcagatctgctgcgaattgctgtttttttgttttgttctgttttgttactgttgtttaattaatctgcactcatacaaccaccaaaacaatcacggtcctactggtaccagcagatgtggccgaaatgtgccctgaaacttcccaactgcagctcgaccctgcttgcagtgctgtgtcataacgaagggaagtcaactcaagatgcattttctggaaatgccatggacgcacagagagaagaaactacaaatagtgttgcaaggaaggaggccagcggctgcattcactgtgtcactgcggccaaggtttctgggtaccttatgttcaccacctgccacctactgtggtgtcagagctgtctggtccagccgggacagtcaattgattttcacagaacgtccattttatgtttccacaccagagcacgctgcaccttcgtaaggaggggtggctgcttctaagggcagagcggctgggccccagccaagcctgcctccctgactgcagaagatgtcacctcccccgggcactttcttctgggcaggggcaaggaggaggaagggagaggaggtacgtgaagaagatgtcccccataaaaccaagggtgttcccttctcaacctctcccttttccccctctaactgagtctccaaaaaatgcatgtttccattcacaaaaagtatgcagaatcactgatgggagcaaaagaagaccctttttcctattacaggcaaaacctaggctgattctcttgcttccttcagctgtcaatgaggtggtgtgttcccggcctcctgacaatataatcatcataaactttattattacatctggaatttcatgatatgtttagtaattgattacagagacacaacccagaatgcggctcccactcgctctgccacgattccagtaacctaactgcttaatacccctggaatgtataaacagtgttaactgctgcattccccacactgccatggcagaagggaaccacggagctggtggggctctgaaagctcaaggccattttcacttactgaatataatgtcatgggatagaaactgagatcacattttttggagccacgatgaccgacgacccctcatcagatgtgattggggcacaaatccactaaaattatcagctgtattggggaacggagatgtgccatgaagtttgcacagggccatcacccatccctacttagtctcagtttggtggggactccagtttaggggactgtgattactggggttcttcaaaaaagctgcacaactcgctatttctaattttatgaacaccgtgatatgaatgcaatgcaaagcagagaaaaagccatattgggtcaggcctgcaattacagtggctagtgcacttactatctcataggaataaaggcaaaaaacaaaaacaaaacaaaacaaaacaggggtaggccaggcacatggctcacacctgtaatcccagcacttttggagaccgaggagggtagactgcttgagcccaggagttcgagaccagcctaggcaacatggcaaaaccccatcctacaaaaaatagaaaaattactcaggcatgatggtgtgtgcctgtggtcccagctactcaggaggctgaggtgggaggactgtctgagcccaaggaggtcgaggctgcagtgagccatgatcatgccactgcactccagcctgggtgacaagggagatcctgtctcacaataaataaataaataaataaataaataaataaataaataaataaatccaggggtgaaggccacactcaaagtgtctgggagttggggcctcagagagatctacatgaacagggcatttgttccctcccactcccaccaagggagggcgaagagcaatgcagctgccctccctaacactactccaactcaggaggttatgaccaaggacatgcgagcccctctctgggtgaaaatcagctccattccccctgcagaaacgctcccactcagctcttgtgcctacactctccctcctgtaacaagtcaatttacaaaaaccagacccatctcagcaaggggacctggatcggcccttttcacccgcatatcatcttgaacccaaacagtcccttgaaccagcaaatcctcagccaaccccgtggcatgcagagtgtgttatctctccaggcagatccactttataaaccaccaaagaagccccatggaaggttctgcttgcaacaaaaaaaacaaacatgctgatgtcactccaacctgagctcttgggccccagtgatggggcccgggggactttacagtgggatgcttgtcccagagctgcctctccaggccaagtgagccatcatcctgggaccacctggaccagccaggcccccatgaaacttggccagcgcgttcccgttaaaaatggtcctgccattcacctcagccaggttcccgcacgcacgctaataagtacttgtttgttgaactgaaaaatcattaccacagaacacgtcaagtaatgaaagatgttttccttgcagaaatgttaaatactccacttctttcacaaggagcgtgtacgtgtgtttccaaataataccttgctccctccccacccacactacatcagaaagtatggagctccaagacccaatttgaacagggctcatgttgcacggctctaagaaccaagaacatgctgttattttatttattttcctttgcccagctgactacgtgtttgttctattagttattcacctaaccatctcggtaggaacctccgtcactgtcacgtaggggagggtccactctgccttatgattttatacagaaaagcaagagaaaataacaccaccgcagcctcatctattacacacccatagtatttgctaactaatatatgtgaaagagccattttactacaacctcagagcagaaacaaaggcaagaaatggaatgggaacatttcaccacatgaaaaccactgataacccatcttctcctctggcaaatatgaatctctgccccctttcaaaagctttttgttaggcagatgagtaataacaattgcgtcttatgcaatgcactgaggtcttttaagtgttttggaatgtctctacctacagggagtcacactggttaatttctgctgcctttccctctcatcctaaggcttcaggcaaagccagcagggtgggggctgagcctgctttgagtctatggcagctgagttaggaaaaaccaaaatgacttccaggtaaccttgtctcatggaactccaggaggcaaatacacatcacttagatagaacactcaaatatcaagttgatgcgggggtcagtggagtcttaggttttctcaccataacatatggctttgaatgtggtggctctatcctgccatgcccccttgagacataagagacctatgtttatgcctggctcccatgtcagagaatccataacctggggacggagatgctgaaatcctggccaaaatgcacacccacagaagccaaatctcctctaaagaataagcaatcatcatcccttcttcctgccctctctctgtcatgtgttcagtgagtcactcaaaaagctgccaggggttacctgggggagcaagaaacacaagatcctgaccagggctccaggaaaaatgacctgcgtgaacttctcaaaacttaaagactttccctcttcttcacccattgcttgttttcccatttttaagagggagcaaatctcactctaattttactagcattaaaggttgacattttttatatgtgaattcacaaatctaccataaatgattcacgggatctttcttcctttgcccttccccgacgaaccgccacattttggaactgcgttggctgacattaagcaaagcgctttctcagcaattatttggaaaggagagatggcaactacaagaatttctctctgaggaacagaggagctaccctcacggcccacttccaaatggccaggtctcacggaagacaggagggcctcctcccctgcccggacactgccatccacctgaagctctcaagccctggtcaggcatctactggaatctctggcattcctgcagcacaccccgttgttggtctagaacaggtactgactgccctggaaaatactgaccttaaggaccactgctgtgtgttcagaaaactcaagagactggttgtctcccactcagacttgtgagcttagaaggccaccaaggagattccggctcaagaacccaaatcgtcacctgaagtcgaagccactcatttccctaaaggccaagttctgataaggaacacttgccccagcctcctgaacaggtgagacctctgtgagggtaccagcaggcctggcaggtgcttttgcttatctgggtctctctctacatatatttctctatccccaaaaggccagagctgtgtcacccccgtgggctccaagtgcattcattacagaaggtggacgtcacaccatgaggtgcagccacctgagattcctctgggactcttggcaaaaaatccccggtgctgtgacagggagggagtcagggacggagtccctagtgcactgatctggcgttccctgaaaacggtgtcccagctcaaaaatgtgttgctttcttccttttcatgaattctaatattcaagccttttttcctcctgctaattttagaagtcctgctattctttgggaagagaatggtgtgaaaatcaagcatagtatccaaaaataaaagagtagatctgtttcagggtttgcagcatatttcactgaaaagcaactccagatatgccactttctatctagtttttaatacattttccaattcctccagaatattttagcttcagaaaaagcaagaacgaacttcctgaactatgacaattttttttgaggctgaaaggggcacccagaatggtctttaaaccatgactgggggccttttcagaatgtgacgccaggttatcgctctctggctgggactctgtagtgcactttgtgggaccacacggagacagattcgaagtaggatggatggattctctaggtccttgagcatgttccagttaggcaagaggccagaggagatgcatagcttactctgagcatcttgacggtggacctcatggaatgtctttcaagcttcccatcttcatgttttaaaaaatccggttatctaaggaacgaagtttcagacccaccagaactgtagaagggcatcggatcctggtcagcagggtctcactccagttcttcggggtctgagactctctggaagagccaagaatgtgggctggggagtggagggaacagatgcggggcaccagtggatacctgaagaccccagcctgtgcctcctcaccagccaggaaagccagagatttttaacaaaaagttagaactttgtgtcaagcccttcaagcaaacaataaatattacttctgttcataatcagacttctctccagcatcgtctttgaatgttgaacctttttcaattaattaaaaactatgcactgcagagtgcatattttatcagccctcagctgcttaagtgtctagaaaagaccaggcagtttttctttctttcttcctttctttttctttttttctattttttttttttttttttacaggcaacccagagcaagtacttgcaagggtcatatctttttaattatcttttctctctttgattaattattccgtctgacaatagcgtgtttctaatgctattcacctgcctttgatgattgacaacttttctgtctgattcagagcaaacagctgctgccacaatctcctagcaacccgggtgtgatggatgagcccccaagatggatggctgcaataaatcatgtctccagccataaaactgagaaaaggggataagaagaaaagcgaacaaaaaacaaaacaaggtttcttcccatgagtgcactcagttccttaccaattatacctgaaatggactttgcacctattaatagcaaagtttttctaatcagtaaaaatgggatgatggcatttgtatcaaaggtgtttacaattgttcctgcaaattggcacttgtactccaatcaccttcaacactgcccaagtgcaagggcagatgatcaaagttttgccttcttccacgaagtctcagcaaggaacaacatcacctttgtaccactggctacaattccaggcaccaacaaagaataccaatctgattctacccaatttttggcagcagctggacaacaccaaaagtaaattctaagtcatgctgaatgcagtgcaaagtgttaggctgcgaataaagttatttcaaaataaacacacacacacacacacacacacacacacacaaagttgcctggagttgatgagtgaatcagtaccatttccatttctttcctgttcatggcagttgcaggcgttttacatgtcagggaaaagtttgtcccagaagcagcaagataggaacattcagccctttcacaaattctagattctcatttctttaggtagaaaaactcttccgttctaactttctatcccatcattcttaaaaattaatgtccacactgtaagtcatacaacaagcctttgatttcattagcaaccccaaataaagtcacatatttaatagaatccctgccaattaaatttgcactatcggggctctcccagtagtgtagatccagcaggaaggcctagagtttctgctttcctttttccaccagggaagcaggctgcaaggcctcttgcagcagaagaggtggaaaggccagagcttcaccgactcctcaggcagctgggggctgtgtcagtgaaccaggctgcgtccctgagtacttccagtaggtgggggtgtcctggtgcacacagctcaagggtgcaaacccagaagcgattaactggcagggcttgggaacagctgtccacatcaggcctggtgggggtctgctggggccctgcagaggggacagagctcagacacaaaggggaagaggctgctgggagcccgggcagggagccgcaaaagattattttttatctgaaatattcctgagacgtggaagtctttacgtttcttcattctcacactactaaccaagccaaccaaaagatttttttaatagttatattgtgctaagcttttcagatacggtgttggtttttcttttttttttcttttttttttttttttagcatgacacggagtttaaaaaaaatcagacaagggttctggcttcagcaactgcagctctgtttatattttaatgttttgtacgtgactgcttctgtgggggaagaaaaagagggagagagaaagttgcctgtgagctttagtgtaaatcacagatacttcatttttctctgtgtccttggaaattattcaaaattaaagccttcctccctccatcttttttttctttctttctttctttcttttttcttttttttccagtgggggagtcttctgtattgcacatgcgagggtttgtgtctggtcagctgcaatgagaaggcaaggccaatcgatagaaacacacacacaggcccctaccctgccccagcttgtccgactctcaagttacaggtttacacggcaagtctaaataatattcaaaatgataaatggtacccgaagcccggcatccaccatcaatctttttttaaggaacatccatcttcaataacgcacgtttgaatcatgtgaagtcaggagccctgagattcatttctaccaccctttgcaagccagggtggcttgaatgatacctgtcaacctttttcttttttcttttttttttctctccccttgactaatggggaaaaaaaaaggcagggaaaagagaaaaggaatgagaaaggggggaaaaaaagtcagaagagtgtcaaaggctgaacagtgtggtttagcagataatatgaatgagcataacctctcccgtgcctctgccaatctcccacccgccacgccacgcacccagccatccagaagcaggctctacccccttctcccctgcccagcctctttcctccctttccctcttgccaaatcagcagagctccctcctgcaagccacagggtacagtaccaagaggaggaagagacagcctcacatggacctgggcttccctcccctccccgtagtctggctggggcccatatgataaatgacatatgtcattctgtcaggagggaagggtgggtcagtgatgtatgactctgctgaaaaggaaatcgactgtttggcatggtgcagctcttctccaccaggatttagtttcagaactctgaaatgaattctccgacgtttcaagtgcatacttagggcagggtgatgggaggcctgggaaatcgtactccatcctcccactgcccttcccatggcaaaaaggaaaaaaaaaaggggggggcgttctgctgctgatacctgcaaaaggccacgcacgtgtcgaagtccctagctgtcgcaacaccgtgggttatttaaaaaaattgactttaaaaaaaaaaaaagaaagaaaagaaatcaagtggagtcaggttagcccttttatttatttattttttaatggcaaagggctgacacaaaagcaagataaaaattagcatgtttgaagtaatcgtcccgcagcttgacatctgcatagtaaattttaaaggaaaaaaatgtgtcagacagccatgagccgcctcgccctccccctttcattagctcactgccagggtggcactgctgaacctcattatggcgagaggatttatgaagctgaacccaatggcaaagaaaaggcatctgtcaataattgtagggagctgcactcacagctttgaaatctcattaagtatgcagttatcaggcataaagatcaaaaacattactcaactccgacagaatcttatggaggaacattaattagcaacaggcctacagtacaaaaaaaaaaaaaaaaaaaaaaaaaaccacagacttcctctcacacctgcccaacccacaaacctaaagcaacactccccctcccgcctgaaaaaaaataattcccagcatctgaaactgatcaagaacatgaaacaagagagacgcacacagaaaaggggaaagggagggaaggggtgggcggcgggcagggaggaggggagagggagggcggggaaattcagttgagaaagccttggcggtgaggagagaaaaggaagaagctgtcaaacttgagaaggatgtcagtgcgggccctgattactggggcctatggagttctcagaccttttatcatcatcaccatcaaaaccagtctaggagtcactaccgggaggactgggggctgcaggtttgcagcccaggcccagggcccagaccccaggaccctctcctccagcccctgcttacctggcaggcaggaggctgcagggccaagacccaggaggcaggccccgctttccccagccagtctgcacccagccagctaaagctggcagcaagacctgccttcacaggctctggacacaggccagggaaccactgcgttcaccttccatctctcaaccactgtaacacacctttttcttcctccaaagagactgcagcatccccttctcacacaggcaccttctgttatttgatttctgtgtgcaatcccttactgaaaaatacaatatagatgggggaaggcacgtggaaactgccaagctgaccctgagtcccgaggcctccagacctctgtaacacttgggacaaggtgcagctcattacgggtgtccagcagatccacacactagtttgactctaggatctccaggaaggtaaaattaaatggcaagtttcctaccccaccacattctagcctcttgcaagatgcattggcaaagagtaatgtacataatgtacatgtgtttcagaagcatcccacaagtattgcgcacttggggtctcaggcaaacttccctgatgtcctgtggtggtctggatccagggtaggtgcacagaggcctgatggggtgggagtgtgtctcaaataccacacaggtttcagtccaacaggcaacatcagccactcccggacatgtcatgcaacagtgaggcaccatctgtagcccccacccccatgaaaggtgtaggaaaataataaagtagatatcctgcatgttatttcccttattgcactgttatagaaaggtggccttctctgttcacctgctagcatgcactcactctctctctctctctctctgacacacacacacacacacacacacacacacacacacacacagcacttcccacagtcccacaccataagaaaacctacagaacagctcctttgatccgaatcctctgctagcattctcctggctcctcactcactcctaggccacattcttccctggttccacggctacttctgaagtgtttacctctctggtctactcagaagacaatggtcaccttttcataattagccacatctttaagaaaacgggcattaagattcctaggcaaccagcttggagatccctccaaaccaaggcccatcttttccaataaatgcctctcctttagaatatcaatgaacacagctcgaataaactgtcacctatgaccaaaaataggaacacttgtctataaaccagacttgatgagaaggcattttagcaggagtattacaataaggtgtttacattttttatgtacttaccatattacctttattatgtgtaacatcaaagtgattatagcaattacatctaacagaattaattacagaacttcgtatcattccaggatacataatgcattagaggtaagccaaagaaagaaaacatcttgattgtggtaactattgttggggtgtattttctctagcagcaatgccacaccaacggcagctttctgagcaatggaaactgaggggtttaacagggaaaaagctgtattctcttaaaattgaactcatgctttttgcttaatagtacgttggtgatagtggacatataaaatcaatttaattttttaagtgtaaatctttaaaaggtgctggttaatccacccaaccaatgttaatacataaaggagaaagcacatgggtgaaagacttacaagtctttacgtatgcaaaataaattcactcaaggcttcattaatattaatttaaattcaaaacccatttacattaaattgttcattaaaaattgcctattttatgcaacatgcatttctcaaagaactcagaggaaactgaatacataggactagatttaatgatgggaatggaaaatcaaaagtaaatgaattggagtcatttcacgtatattaccaaacagccctttgctctccattaaggatgggttccactttgggaaacaaatatattttctgaatattgtgttttccattgctataaacttgtaaacatgaccttctggcctaccacagaggaaaaagaagaaacacagagaaactggtggaagggagagggcagccaatccaaaacctggctaacattaaaacagggatggtttgccttcggatctcacctggattcacagtgcattgagagttaggcttgcgtttttaaaaatgtacgtaagttagcatctgccagtgcccatcttgatctagaactaacagtgtctctctcccctacactctaccctttacaatcctttattctcttagcgaggtgaccaggaatgcgatgacaaggagttggtaagttccttgtgccctccctcccgacaacaatctgaacttaccctgtttccccaacagctgttctggatgaagaaaacacagtcataattaataacatgtgtcctgacagtatgaattaataatttatcattaagcccaaacaaatttaaattattcttcaagagccacacctttgcatatctgagaaaataaggtaaggagatggttaaaatgtccaggtaacgtgaccttcagtgaactactcgcccccaccccccggactgtatctcttggactattcttgttgaaatgctaaaataatttacagaattgaaagtaattaaacccaagaatctaaatgctgatcaaactaagtgcatgtgctagaaatgtcttcttttttaaatggggcttataaaatattcaatatttggtcaaggacactctgtaatctttctaataaagattcctaaacctagagtatgacagttgttcaggcaagtggtcataagaagattatgttctattactgtctttttttttttacttccaaaaatgcatagcgttattctggtcacaaacagtgacctgaatttttaagtccatttctaagcgtaaatttctacaaatggtgaaaaattaagaaaagctaccaagtctatgtctccagtccttacaattcaggttttttttttgttttttttttaaagaaaatccagaaacaggggaaaaatattgatagccattgtttagtgggatttaaaaatttagtgactaattgcaaatactggaaactggaattaatctgtctggatttttttaaaaaggcttacagacatttaaatgcatgtatcgggacactttatcaacctaacataaaattgtcatcttatcttattatatgactattttatgcatgtgtcaaagaatttaaaaatgactgcctgtctattgagtctaattacaactgcacattatctgtctggatgtaccagtccatatcattgttactaaatacaatatattgtattcacctttcatttgtaacttcagacagagaaaccacaatttagagcataactaaaacacagacacagacacacacacgcacacacagagtgaacacctgcaagggtttgggatactggataccactgttcccttctgtccttttcccctccatgggctttgagggtgatgctacaggggtgtgataaagcagctgatttgaaagatccaactacctacctgggctggacactaacacagaagggtagacacacacaccctactttatttcatttttattaattgttttacgacatgaccaaagctatttttaccctctgcccagtgacaggcagggatgaaaatggggcaggaggaaagccttacaaactgcacttgggataactgtgaactgctgccactcttggattaaacatggctgtgtgcaccaggaccgggcacttcctaatcctttcctctctgcctccccgcgggcctgcctgcctgcctgccgcagccctggccccagcctgactctggcaggacacgtgtaaaagagaaagcaccacaagaggtccaggcactctgccttcaagaaggtaggtcctttctctttccagaaatcccaggagtggagggcggcggtaaaggaatggttttaattctctcaactcacctgggtttcacggtatttcccacagccctgagcagtcgcctttcattctaatcacttgacaaaacaatctttagcaaaaagaggggaaaaggcagacgtgtgaggcaatttagggaatcgctgctgaggcatcagttattgactatctggctcctgtttatgagcgcgctcaaggcaaaactgagaacaaaatgacaacatcaacagctcacaatcaagtgtggccctggagagcactgaagccctaactgacagctgtcaagataatgggggcaccgcagctgattctggaaggttctcttccccacgtggacatccaagggaatagccttgcctcccacctcctttgtttttctccttcgtcttcttggctttcctttttagaatttgcattgttgctctcatttcgtaggaaatgggggaagaaaaaaatcatagaacggtcaaaaccagtcgctctgccaccttgctacagagtagaatacctgtccaaggagaaatacgtggcaggtatgagacgaaaaaaattcccaaagctaaggccgaaatgcccttctgaatgctccatgtgcttccaagagagaacggaaaagctccttcctggagctgcccgatgtgtggaccagacttaggaaggtgtcatctggacaccaccaggtgggccacctcttaggcatgcccatgtctactggcaacatggaaccccctctggctgttccagggggatccacagtgttctgtggcaccagcagaccctagggggtccaagtcactttcacaaaagtcaagatgcttgaagatttacccttgccttgtttttaccacctaagaactccacggaacattaccccctttcaaagaatatagcttgctggcaaattgtggttcgatggtttctttttgttttttgtttggtttttttttcttttggaagcataagaaatggtcttttatgatttcacatttgcctccagaaaattaatataagtaaaatatctgctattaagtattacactaaaatttttctggcattttcagaaatgttttttaaaaaccactctgaacaggagaaaatcatgctttaagcaggggataatggtcattttgcctgaaggacactgtccttccctaaccccactcctctgagcttctaaaagcagcaacatctgtccagcacaaatgcacaccccctggaaattacaggtctcaaggaagcaaactcccgcccaggtttctctttggcaggtaaagaaacctctctttctctttgagaaaagaccctaagccatacatagtttctatcaaaacatcaaaaaatcctaaagtacagaaatatgtattttcagggattcttggagcctgcttcggccttcgggaaagcaatgatacattggcctagatatgaagaccgtgtgtacctgtgtgccacgtctgctcgccctacccagctcttggccttttgtggttgttattctaccctagaccattaaaagggccctaattcctatgacatgattatccaggtaccaaagcccatttgtcacctgcagcagaaaattgagttaatgcacaactaaaggcagccaggactgtgtaatatcaacttgattacatcaaactagctgcaaacctaattctgctggatgacactgcgtcgagcttgtcatctccaatcattaaagctgtcaggaatccatcaggtttacagctaattaggtgaacactaatgaagctggcaaaacaacttttctttttttatggctgagcggacctttcagtttggaggggaaaaaaattctcgagtattctcaaggttgctggggactggatttccagttaccaatcagcagacatctttcttttccccactctctctctctatcagtacaaagcaatcaatttgtcatcactcccagtatgccacaaaagctggcatgaaccttataacttgcagctgggaaaactaaaaaagaggagaaaaaaatgggaagtttctggtccatccaaacaaacaaaccacccccaaaaaaaaaacctctgtgcatacttatcaccagcctaaatgtggagttttttttttttctctccactcttcttaaataagtagctcttcagtccgcctccaccccctcctccacatgtccattaggcagaggcattctgataaagtaaatccaaaacccgagtatgggaaagaaataaagcactcatgctgccagcttctgattgaccattaagctattgatgaatgtgcctgtcaggagagagacaattaaatcaaatatgaaacaaagtcgttttgacgggtcattttgatagagcaaaaccattcttccatctcctattagtcctgcagtcaagttttttatataatgaatttttcttaactgacctgagatttcctggctggctttctttaaaaaaaaaaaaaaagtgtgaaaaggttagtgaacaggttgctctaaaaataaataaataaataaataaataaagccaacagcaggttccctcctcctctgatatttttctggaggaagctatcaaatacgagtctcagattggcagggtgcaaccgaagagatgaactagagagagagttctgaaccaaatgtaaagatgtaatcacatatggttcattggatggaggcacacacataccttaaaatgtgtatccaaaaaggaaagaaaaaaaaaatttcaaagactggaagaagcccaagacattcctactactcaactttgtgaaggattcctccaaagtttcagagtttattttgggtagataagctcattgcttgagcctggaatttaaagtagaaggtgggacgggcaagaagcaagctccaggaggttaactagggaggcggcaagctccctacaatcactcctggaattttcaaactttctaaatttgggcaacaccgaggacagagagcaaaacctgcatcctaagccccaaaccaaccctgttttcttctgagattttctgaagacactggcaggcaagtacatttctgggagaagagagaattatcattccttctctgtgaccccgtgtaaggggtctggagtgcagagtgcagccaacgtgtgaggtcccctggcagtgccggctggcatgatggaaattatgggcactcagggcaccatggctacaacgccttcctccaagatgggcaccagccaatgccctgaccctactctctgcccttccctcttaacatcaaaagagaagtaaaagaaaggaagagaaaagaaaagaaaggaagccccacttaaccctccccttcagggagcatctgaacctctgcacatctgagtgttactcatatcaaaatacatcacgtccatatgtggtcctctcggcaatccgccccaaatcccaaagttgcactgacagggccctcctgacgtcacagagcttggcctcactattgcaagtgatttattgatgtttattgggaatgaatagatcaaaggcagcagcatgacgggcgatcaatcagtcatcaaatcaaggatggcaacgggccagaaacccttcttccaggcaacatgcccccaaccgacattattgcaaaataatgttatgtgtgtggtttttgttttgttttcaatgatgcgttttccagaaaagaaaagaaaaaaatcggctcagtcttaacaggagttgacactcccggttaaagaagaagaaaaaaaaaaaaaaaggaggaacaaaaaagtactcagacacgtcccagaactaagtgctatgcggagatgagggtgggagcagcagtacaaggagggggtgggggcgaggaaacacaaacaggggagaaggaaacgccagcatctaacatggacttgacagtcatctgacaatacccagaccctgtgcgctccgggttccaccgctgtgcccagtttgggcccaagaaatgaggaatcaatcgtgttagtactaaggtggccgaggggaccggctcgctcactcgttcgcgctccctggctcggcggacaccaggcagtcccccggcggtcggccgctcggaggacgcggaagatgtcccggggaactcaggtgaccccgcccgccacccacagaaagagccaggccggggttgcttcccattccctctgcagccggagagctgaggaggtagggacctggcgcggctcagcgcgctccgcgagcggctccccaaatgggtgcgagagggaagagggcagagcgcggcggggcgtccggggggcgcccggtacccgaggcgggcgcacgcacccaaacaggagagcggcgcccggagttactcagtgcgggcagaagagcggggcgaggagcggggtcgcgcccgctggaggcgcggggcgagcggaggaagaggaggaggagagcagaaggaaggggaagcggctcgtacctgctgcgcgccggggcgcctgctgcttcctcctcggcatgatgcttctccggcgactgccactgccgccgccgccgccgctgccgggctgaggacagggagggagggggcggcgggcccgcgggggggcgaggcgggcctgctctcagcctcccccccggagagcggccgcccgcaggatgctgctgcgcccaggctctccgcgtcccccccgcgccgcgctccgccgcgaaccccgaacgtgcggagggaagaaggagggcgggcgagggaggctcggggagggaggagcacgggggggaggaggaggcagaggaggaggaggtggaggaggaggaggaggaccgcgctgccggcggaatgggaagtttgacaaatcgctccagaggccagaggaggagggggcggggaggagcggcggccctgcccccccccgccccgtccccagacgaggtgcgcggggttcggggctggggggcggggagagggcgggcagagcggtgggaggaggagcgcgggagcggcccggaccggtactgccccggcccccgcccctaggccgggggtcacggcatccggggggacgcgcagccgccgccgcggcccggggctcggcggtccagtcttctgcccgtggcgcggctggagcggcggcgtcggcaacaggcaagcttaaaggaaaaggagatgatcgtgtcaatcgcccgcccgcgggggcgccgcgcccccgcccccggccccaggcccgcgtgggacccccgccccgccagcgaaaggggtgccgcccctccgcctccgccccgtgcgcacacgcgggggcgcggcgccagccccgccgagcccgtcccggggcgctcgttaccccccacccctattcccacccagcgttcgtccccagccaccccccagctgccccacccggctcgcactcctctccacccgccgactccggagcccccagcgtggtccccgggccggggctggcgtcccccggggaagccagagcccacgggcaggccccctccagggaggaggcgggcgcgggccggggcgggtgggggcagccctcagaccccgcgccacccagctcctcccccaggacccgccgtagccacttcccccaattttttttccccggacaaactttcctgggcccgtcccgggggtcggtgtgggagggggttccttcaagtttcctctcctgactttgggatgatcagggtccctccaccccgcccctcgcccccgggagccgggccgcgccccccatccacggcgcgggccgatcctagggcgggacgggggcgggagaaggaaaccgggctcccctgcccatcccccgccaggggctccccccgagagcctagggggccgccgcgccgtgtcccgcgcccggcctgccggggctgctggactagagggattgattattgattggtgatcggggtcgctgaggctccgggccggcccggccgactggccgcggcaagaaggagctggctgggcggcgtgggcggcggggcgacgcgggctcacttacgggcggcggtgagggcgcgggtgggccggagctcatgcgggcgacccccgggcggcggcggctgagcgggagccggagcccgagcggcgcgggcggcggcgcatcgatgcgctgcgggctcgattgcgtctccctgggccagctctcaggccgggaatggggcggccgcgccggggccggctccgggcgctgccgggcggcggctgctggagcgcgggggcggcctccgggcccactatccccgaggcggccctgcgcccgggcgcgccggctggggctctggcgctctcgcaggccccgaggccgacagtcccggcgagggcgggcgccccgcgctccagcaccggctgcctgagcgctcctggagcagcaaaccccagacttcttcctccttctctccttccttccttccccctccccttatctttttctttttttagtctctttctccctctttttctgccctgtgtcctttttattttttctctacgactgtttttgcaagtttgtttcaaaagttcacagcatgctttcttttcttttagaccgggagacagtgatctcacccacacggtaagatcaaaagtctccgctcgcccagcctgcgggcttgggctgggtccagacgtctcccaggatgcagatgcgccgccgctggcctccccggctataaagccgcctccagcgcctttccgcgcgcaggagcgctcggagttgtggggtacggaccccaggcggggcagggagtccgaggcgggctgcggcggggctctcgggctggcggactcgggggctgaggcgccgtgcgcgttgggtgcccgcggccgcagaggccagaaccgctactcctccaggccggggagacgcggccgtggagcgtgaaacgcttcttgcaagcgaggaaacggtgagttggccgacaccgccggcggcctcaccattctggtggccgcgctgagctcctgtcgcctggaggcgggttgcgccgcacggggtcagctcccgccggctcccagctcaccttcgaagctcccacttaggcgcgcccggtgcggcgtgtgcacagcgcggggcgccgcacacggaagcgtgtagttctccctggtcgcgcttttctcctcctttccatcccctcgctgttcttgcaaacctctgttccttcggccccctcccactgcgggccgcggcctgaactcgggtctccgcgtagccggccgccgccgctgggtcgctgcctggccctcccccgctcaggcgccgagcgctgtgcgatccgccctaacatctgtccgtccaaccattggcgcatccatcagtgtcaatgggctgcacattgcagcgacagcccgccacgcacaacacgggctatgcggagtgcacgcagcaaccatactgccatgtcgggacacgcaaaaaggcccccggcctggcttggcacagcctgaaggcctaatctgtgttctttcagccacatgtacccacccccacttaatatctggacccccaaacatgaatagttttgcagaccattgtagggatggaattgaaggaagaggggcagtgtcgcccgagtcattattttccaccaggttttctctgcccttgtgtgggctgggtgtggctaggagagaaggaagggagacttcccaaatccgcaccaagcacactgcagaaccggaagctacctggatgcaagggcttaaacccccttcacctgggcctaggatgtgttgtcgaggtcgctggccaggttttagccaggaggtctcgcgctaaaactttttggccccgcctggctgctgtgtgtgacatggcctgatggagaggagctggagagcggaggaaaacgtggatcccagtgagaactaagggccagatttagggagaaatagtgtctggatggcagtaagtctgtaattcacattttgtttacaaagggagaaagggcagggctgtaggtttgagaagccagaggtttgcgcggagttccgtgtgcccattccccgagagtgccgctcttggctgtagttgtttgttctacctgattttgcctcttgccttcaactcccccataacccctccccaaatgtccagagggcaaacatatgcgcatacctccctgatcaatccagccagaccaaagggccttccctgtcctccccctaagaacttaatgggaagagtgtacgggggacctactcttgggacatctgcagggcggctgtaccaggcgttttacctgactttattcttaccgcaaagatttccgtctcggtacctggtgccccctcagagtccactacacaaacgggtaaaatcccgcgcggctattcatttcgccattcgcgagtaagaaggggaaaaggagccgcttctaggagagcactgaggtatgctcggttcggttcccgaggaggccagaagcggccgcggcggcgcgggctggagctccctcctgcagggagacaccgcgctctagggtgcgggcttcgccgcccacatccagtggtcgaactgttttcacgctagactagagggcggaaaagtctgcgcccgcggagaaactagaattctgtagaatgtacactgtgtagaaatcttttcaccccactcttcagagttgcagattatctttgaaaaacaacaggctctggccctgccagccctagtaacttctacccgcctgagtcactctgaaaagtaagcccctaggccagtgagatgtccccacctttgggaggtgccgcctttccgggaacattaaaaaaaaaaccctaaaaatagaaggaggaaaaatgagcaaaggcggtgggacgactcaccgaaacaccgaggtgcaaatgtccattggagaaactggcagtcgcatggcagccagctggctcacccaatagctgggtggtaaccttgtgatccccaaacatcccccagggccatgaaggcagtgctgacccccacgattgcacctcaggcccggtggaatcccgctcctcctccatagtggtgctatgtaatcagtagaaaatcagtagaaaagctcccaaatgaagctgcttcaggtcaggggttagaaatctgcctcagactttttgaactcaaggaaatcgggacatctgtccccagagctacctgtgccccaccccaggatcattcatgaccttagctaccgggagctctgcccggataagtttttaaaagagagagagaaagaaaaaagtcacatgcaggcaaggctaggaacaggtgtgtgctgtggggacgggcacttggctcgcaacacaccacacaaagtcacgaagtctgtgccagaaaggagtagccaaaccaccgccgggaggcagccgaggttgtgtttaaggtggcgattgagggcagtaggtgacaactcgacccaaagaaggccaagtcttgtccttatctggggtggccactgagggaaaagacttaagggaaagaagttgtcttcaaagctaccattacaagatgaggagctagagtgggctcaggtcccaggcacccagggcttaagccttgatgttggagaggttctcggagggaggcttgggccacctggagggactgggcactctgagtagtaccctctgggaggctgtaccccctttcaaagtgtgagggcatttgcccaaggtgtaggcttttagggagcccagggctgggcagcaccaggggagagaggcaccaggtgggtgccctcctgcctgcactcacctggaatgctggcatatgggtttttcgccttcctcacgcctccccacaccacattctgggctaggcagtgtcgaggaggtgccttgggttcagggaagcttgccacctgcacacctgaaccaggaattgggccccggaatctcagcccctgcccaagcaggaaggatagggaccctggccctcgccaggtggtaaattgtttgctaaaagtgcatttacacggcggcgaagtttgtttctcttttaccggtagctttgttttaacgaaccagatgttttgtctgtaaattctcccaagaacttttccagttttgacgtgaaataaaccttcgaaaatcagaagagtatattaataccacttctgtggggcctcaggagagctgagtcaggtgtgcctggatgggagctgggggtgggagtacaatctttggagagaagtagggggcttctcttggcccaaggtcaagaattggtttgggggaggtgaagtgcctccccgactcccaaaacaggcgcacacacacgcattgtcacaccagagtacgcactcccagccctcctccaaccaggcatagcttgctacttcgtaaatttcttgtggcttggggcacagagatgtagctcaactttgcagactgtgtccactgcatgccgctgccgttttccacgaggaccgcctgactgaaaggcaaaggggccttcgatcttcttcccggggcagctttgatgcctgagtgtgcggggccggggccggggccagggcagagcagggtggaagctggtgcccctgtctggcccacccttaactcctgggcaccactcgattcgggagaacttggggtggaagccgacctggtctaggaagccacagcctgcaggtccccctctccaatgcctcattttttccgatttaggatttccaggcagttataaacaccttaaaaaaaaagacccacttaacaatacacctaaaagagggagggaaggaaggaaggagtacggttatcacaggcgtgtggggagagggaaaccaggtctgcctagaaacccaccttctggtcctgtgagtcatagcggccactttctcgggtttcccaagacaggagatggcgattttctgctccctcccctctccccaagctttccagtgctctgagtctcacatcttcagatacctctttcttccttcattctctttcgttcaatcatctacggaactttcaaaaactttttttttaggagagcgaagattaaataaagaaaataaaacgtctttgtatttcagtctaaggaggacagatgcacattaaactcagtttggagcgcttaactccaggcgaaatgcccttttatcaaatcccacgcgtcgacttgggttgcgctgggaatttcacgaattcctcgctgcagcgtggcgtggtttacccccacccccaccgccaccccactttgggtgaaatggatttttggaaaccatttaagcagagctaaaaataagggtggggggatccctacactagagatagctgcagccacctaggggctcacccctggtcgggagcgagcagctatttgctagttgtagctcaggggtgcccaactcttcccgtgtggttgcgccagctgccccgcactgcaggtatctgaatcattacgtgggcaacctgatgcggctctgaaccccagctctttgaatgctggaatcctgaaggaggaggattccaccaggtcttagccgaccagatagcccagctttctgaggctggtgacctcattaactggccagggaatttgcaagaccaggaataatcacgtttcccagttcttctttcctacattgcttttctcctctgtcttcaacgttagggttttgtgtttgtccctaaatttacaatttacaaacggggaagacggagcctaagtttctgcagggcaggtacaaaagagagggacaacactctgggggcctcattctttcacgtttttgtttcttgaaatttgatggatatcaccttagttcggcaataggagggccagggtgactggggacatggtggcccgaagggttagataatatagcatgcaggtagtctctgatctccagggctttgataacaccaagattttcctcctttgcagagcagtcctaaattctgccttctcccttttctgccgcctcttctcttttccccatttctttcttcgtttctttttctgttttctttttgtgtgcctctcttccaacagtccctcctccacctttataagacttctcaaaggttatttatttaaggtctaccaagtgctagccccaaacaggtccagtccttctacctgtggcaagacggaggctgttaccgcgtgcaaatagtgagggaacaaagtagtttggagttttttgcagcttttttaggtgaggggaagggagggaggtcagaaataggttgacacttggtttgaaataaaagagcatgttaagaagtttcgaagctgccaataaaaccctttaagtggcttgtgattcagtgcctggagttgcggggatggcattggtaaatgactctaatgcccaaagaaaaatattacaaatgccgctgtctcggccaccaatcgggcgccgctttcctgcgcgggcgatggctcctctctggcgcggagggcacccacatttgcatgataaattgaccagactggcggcagccaatgaaatattcaaattaggctgggtggcggtagtaggggtggagtccctggggctgccccttggcgcggcggcgggagcgggcgctaccacctctccgtcagcgccctctggaggcgggacagcgcgggcggccgctctggcccaaaagacgagatggggggttgggggtttgggatgcaagggggtttgggaggggtgatggtggggtctgggtggtgcttcgcggccccaggaggctttccggctggcctcgttgactaggcgtacagcagcgtctccgcatgcctcttgcccttaaaagtgttgatggattgcagaagtggatggtgaccccaaggaggggtttcagaaaggctccagcctccttcgcccaaccaccttctctaggttcccctaacaaacccatcacttaagttaaaaacgtgtatttgctcttgttgacttagctttaagacaagattcttgcccaccgcagaccacatggccagctttcccaaaggccctctgataatgaaatggtggagcagatatatcaaactttccatcttgccctgagccaacgaccctgcaccctcacaggccagggcactctggagggcaccctgcctggagccccaaaccttgggtaagctgtgggagcctaggcaggggcaggcagtgcctggaggctggcttcagacggcagaacttctcacctgggaaaatgctttctggaagaagcacccaggcctcaaggcagctccagtgagggggcaaaaagggatatacataaggcataaggcgctggccatggttaggtaggtgctcagccaggaagatagggcagattcacatgggggagattggctcggtgatgagaccacttctgactccaccagaaccaggcccagctcttcctggaggtcctgactcaacggggacttttgcatgggagccaaagaacagtggatgtctcttgtccgctgatcatctcttcccttcccccaccccatattccatcccatgccagatccctaggctgtgcctgttagagctactgtagcaccacatggacttgcctttaaagcagaatttttagaagtgcagttgcttttctttactctgctgtgggatgctgaacaccttgttctttctccagctcagcagggcttggagttggttcctagctatctctgggaatgctcgatccccatctctgttaccagccaaaagggtctgcgggaggtggtcggcactccagtcagcagccctctcagtacctcttccccagacatagtcaaagcaagtcattcatctgcagccagtctcccctgcccattcaccaaggagaacctggggataggaccactcagagcctggcccaggctggctcactaactgtgtgtaaatacacacagcggaaagagtaggtgctgaacacacatgtgtgagagagtgaatttttactctcaatcaccttatatatattatcaatagtttcaaagtatgttgcccaaaggatgttaattcctaagaaggcttttatatcgtttggagttttgaggagtgtgttggctgaagagaagagggtctggccccagtcttgatgggaatgcatggggtaaacagctggtggcagaggtacaaaaggggcctctctactttctaagagaatcttccatcctggctgattttaggacctggggtggggttcccatcaggaggaggcctaaggaaggagtaggacccttcctagatggctgagtcaacttatacgacagggcagggaaacctatcttggaaacccgggagccctccttcctcctccccatcctcaggcctcacctgagacttgaaaatggaccagagtcttcctccaacagtgaaattcgttaaagagtcactcctgtctagaatgtgcagaaatgcaagcctctctctttctctctctctctctttctccaccttgaggatgctgtatctagagcccatatagggacaagaaggtaagcagtgaaagcaggaaagaagtagaaggctggctgtcatccagctgtgcatacagtcctatctcagctgaactgtgcacggtgaatgaggaagtaaatgacaggtgaaggaccaagagagtgaagctagtcagtttatctgaggagataggtatcagtgagtaactgtaaggatcacacccacagtgggtgtgccccgcagatggatatatgtgcagcaagcggtaccttgcgggggaatgcaagctccaactgtggtgctgagcctctggcccataagtaacccagtgagcctgagcaggtcactccctctctttgaaccttgtctccatctctaaaacaggacagctttctccatcttaaacaccaagtaggaattcattgtggaaaccttccatcaaaattggagatgccttggatggaccctgtggtggctcatgcctgtaatcccagcactttgggaggctgcggcaggcagatcacttgagtccaggagtttgagaccagcctgggtgacatgacaaaaccctctctccacaaaaaatacaaaaattagctgggcatggtggcatgcacctgtaatctcagctacttgggaggctgaggcaggaggatcgcttgagcctgggaggttgaggctgtagtgagccgagatagtgccactgcactccagtctgggcaacagagtgagaccctgtctcaaaaaaacaaaaaatagagaaatagagatgccccttgaacccatgggtttttgggactacattctggaagctttcagagtcagaccagagtttgaaagaggcattgtgtcactagccgtgtgcccgtgggcaagtcacagtagagtctacttcccacggcacttgtgagactcatctgggattatgtgtgtccatgccttggcagagagcttggtgaagaatgttagttgtccaataaatggtaccccattaagttggtgtgcagggtggccacagggccagaccaccctgaaaataaaggcttatatttgggctgagcctggatgcacctgagattacaagcaggtgcttagaatgtggtgaaaaagaaagacaggagagaatggctgaaggcagcatgcagtccacctgactttctgggaagattgggcatttgcagggctgataagtcaggttcttccgggcctttctgtgagctcattagaggaaggggtctggtgactgatatttctattttccctgttagtagcgactggaatttgcaccatccaggtcagatggaaaatagaaggcgggaaaatctgacagtctcattgatttgctctctttgccatcaccactcttgagaggaagaaatgtgacttcaaacttgcaattaggaaccagcctgctaaggagtcctctcgtgagctcctgtgctatgcggagcacaggcccatctcatctcatttcctaaggaggtaggttcattcatggtttcagcaggagcaggcagtgcaaacgtgtgacacccgcccgcaaataactgccagaaaggccgtccaatgcttccttcacatttttggtcagatctctgaaaagatggccattctcccaatgttttaaaagtattaacttcctttcaaacatcctttaacctttaatgttttgtaacttgatgaaaaggtcattttgtgctgaggatgcagttgttccggaattgttcagctaacggggtgaattccaaccaaatccagaattatttaatgggatccaacgccccggccacacgcacaataagtgaatattttcccatatatgtctgtgtacaggtacatgtacttgtgcatatgtatttacatatttgtatctatgcatgcacatatactcattgggacttggattcaatggacatttttagccttctcacaaaatgacttatcctttgcaggaaaatagatattaaacttactcttttgaacacattttgctaaatatttgatggcaattatttatggtgcactgtacttattcctgatttcttacagaaggggttgggtcaatttctaattcaacatttcattgctgtctctacaataaatgcctccagaagcttaggagaattgagaggtttttttcctctctcttctttcacagtgtgagctttttaactgtcactggctagagcagtccttcttcacttttaccttccttagctgatgtattcttggaaacagatggctgagcatgttagatttatatttaaaataagagtagagttaataggctcaaataagagcaggaaggtattttctacaaggaaactgcatgaagtttatgcctggactctggaagatgtgttaatacttttacttattcaagaggcattgggttgtggtctgctatgtttcttgctctgatgactgagtttttaagataaaggctctccgggcaaataaggaacagttggatagagtagctcaccttaagtctctatagactcatgtagagaacaaatctgatctaaactgtgtaaaaaaatgagtaagagaactctataagattaacactcttattaaacttaaaagagaaaattggtactttttttttttttcttagacagagacttgctctgctgctcagggtgaagcacagtggcacaatgtcggctcactgcactcacctctgcctcctgggttcaagcgtttcttctgcctcagcttcccgaatagctgggattgcaggcatgcaccaccacacccagctaatttttgtacttttagtacagacagggtttcaacaggttggccaggatggtctcgaactcctaacttcaagtgatccacctgcctcagcttcccaaagttctgggattacagggcaccaaaaattggcacttttaaaaggagacaagttttacttaaaagcaaaagcctttaacaggcctttggctggattaaatgataatgaagcgaagcaaagcttgtgaccactctgtagagccatccagatagtctctctttggggccagatcctctagaatgcatgatttagggtcattcattgcacattcctggcttcagactggttttctgaatttccctgcaatctgatttttgtcttcctacatttctgtgtgtgagatacatcaaaaggtaaaagaatgtgtgaatcatataggtacggtttaaataatacctgcatacacaacactcagtcacctgaaaccccccgacacctcccaattccagtcccctctcctggaggccacctctatttttaatttttgtaatgatcacttccttgccttactttgtagttttaatatttagatgtgtatacctggtcatgttcataaatgaaatcatgttgtatgaattattttgtgtcttgtttctcttactcagcattgtttttcggacttaaccatgtggatttgtgttgctggttcatggtcaaggttctagactatgaaaacattagtttcatgaaaacattaggattttttccccccaattgtttggatatcatgaagaatgccgctgcgaacatgtttgttcctatgccataactcacatggggaatatctcctatttatatatagttaggggtgggattgcttggtcagagtttgcatatctgcagctctaactgttttccaagatgattgtgtcaattttcactcccacaagcagtttttaaagttcccattgttctacatccttgccagcctatgatattgttagcaatgtttcttcgtatttgtaatgtttcctaatctagcggctgtggttgctgtctcactgtgtttaatttgcatttccatgattactaatgagtttgagcaccttttttatatctgcgtggtgatcgggaatgccttatttgtgagatgcctgttcaagtcctgccattatccgttgcatatatgtttcacattatttcacccaagttctctgttgcccaggtttgtttcagattggtttgggacagtggatcagatcagaaatgtttcagtgacatctctcactatatttcctaggatgcttttatctgtgagaaatacgaccccctgctcacactggcttaaggaaattggcaagaggtagattatggctccattatattaacaggaagccagtttgctctgccttcttactcttcgcttcgttttcggcataatctcatcctcaaggtgttttatcttatgatttcaagaggaccacaaatggcgagtggaactaattgcttctttgtccacattccacaaggaagagaataatagaaaacttttcattgacccatgtaatctaagtcatacccttcagtttccaggggccacgtccatgaagcaggaggcatctgcagtgaatgccatgccctgacgccttactgagcactcctagtaggacaaaatgagtactgtatggggaggaggcaacctcaaacaaccaccatgcttactgccaagcctataggatatttttaaattcattttttaatttgcatataataaaatgcatttttttgggatgcagttttctgagttttgccaaatgcacaaaatcacataactaccactgccatcaagatttggaacagtggctaggtgtggtggtggcttacacctgtaatcccagcacattgggaggctgaggcaggagcatcgcttgagcccaggacttcaagatcagcttgagcaacatagtgagaccccatctttacaaaaaactttttaaaaattagctgggcatggtggcatgtgcctgtagccccagctacttggaaggctaaggcaggaggatcacttgaacctgggaggttgaggctgcagtgtgctgtgattgcaccgctgtactccagcctgggtgacagaggaaaaccccatctcaaaaattttttttaaaagatttagagtcgttttcttttttttcttttttttttttggacagagtttggctcttgtcgccggggctggaatgcaatagtacaatcttggctcactgcaacctccacctcccaggttcaagtgattcttctgcctcagcctcccgagtggctgggactacaggtgcccagcaccacacctggcttttttttttttttttttttttttttttttttttttttttagtagaggcagggtttcaccatgttgacaggctggtctcgaactcctaacctcaggtgatccaccctttttgacctcccaaagtgctgtgattataggcatgagccaccgtgcctggcctagaatagttttcttactcccccaaaactgctttatgctgcctttttgtagtcaaactatctgcctgcccttaaccccagctcccccgcattagaaaccactgaacctctgatctgttcttcaccttaaagctttcccttttccagggtgtagcgtatgtggaattatagagtatgtcacctttcaagtctggcttctttcatctagtgtaatgcatttgagatttatctatgttgtcggatgtatcagtaagtttgtgtcttagcagtgctgagaagtattcctttgcatggatgtacccagatctgtttatccattcatcagttagaggacaactgggttgtttccagtttggggtgattacaaataaagccacgatgtacaagcacctctaggttttgggtgaacataagttttcatttctcttaagtttcaatacctaggagaatgattgctaggtcaatggtaagagcgtgtataatgctacaagaaagtgctaaactgttttccaaagtgagtgtagcattttgtatccccgctagcaatgaaatgagagctccgcttgctctgtaagaggcattagtgaatatgaaagtgctttgtaaagactaagggtgtctcacagtgtgcccaggcgggaggattcagagggggcatttctaaactctaaactcctgtgggctcctagcccatccttctgaatggggacagaatacttccatttccaggttacttgcttctccaaaagggagacagggaagtatccttctctttttgcaaatgagggcacagcactgcctctcgtggttgagccagtcattattcagtaggaacagcagtgagattctccagccttctattttattcctggggtcacagagtaaaatgcagcgtgatcatttggagcattcttatgctttgtgacaagaacaaagccagtggaaacagccatgtgtccaatcagaatgtcagagctggcagggaccttagcaattgtcactttacagatgataacctattacatccccaggtccccagaatcccagcccaggactcactccctcagccttcctggattgtcctgggtggaacaagatcagctcatttagcacatagtcttccagaacacaaggcagtgtcccaccaaggttggatgggaccagcttctctatccacagtagctgtgcacacagagacagaaatgaagccgtactgccgggtgcaccgtggccagagatcctccttcctggtatatactcccggagccattgcttctttcatttcagtgcccatttctgaggcaccttcacatttcaaacgtcctgagaatatgtttaattagaacttggccatacagccttttaaaacaaaacagaagggaccagctaattatatcactcagcattctgtggcaaacatatattttttaataaaacactttcctaaccagagtaatccctggagatgcaaatcctcatttataagaagtttcccaaagggagttaaagagaagatgccttataaagaaaagagacaaagagagtggggaagtgttttcaaagagcttttaaaagatacactcattctgaggttgaattacagatattttaagggtaccaaattttatttcagatgtaatcctttcctgtgtttttgatcatgtatttccgttttttccctttttgatcattgccacaaatgcccatatttctctttctggtgtctttcataagtgcaatatttaaataaacaagggattttcccaaaatgcacctcatctcctactctttgtcatttccttgtcttgctctgtaaataaccgtgtgtctcacagcagagcttacacagaatggatgtggggcagtctgtggtcctggggagggccttccctgtaatctctgcagcccaggacagggagagggaagatttagatcctgctgcggcatgtcttcaggagtggaggtcagcttgggacatttacgttcatgaggcagccgcagagggtcagagcaataattgtgccagctgatgtttgctgcggggtttactccaagccaggccacacgctaagaaattaggtatcgtacctcatttaatcctcacaatcctcacaaaatgtagttgttttgctccattttgcagatgaagaagacgaggcttgagagacgaaggaatgaatgaagggtctcacagctgttagaagggttagatcttgtatttggactcaggtctgcctgccctggaacttgactctcccacacctggtgctgggcacactaggagacgtcacaaggctcagagatgccacccttcctagaacgggcgccgtgcctctcttctccacacactgcaggggagacaggcactgtgttttcagataagttccatgtgcatcaggggctcggtgggaaagggaggacacactcagattaggattattcatggaggattctccaaagaggctatttggaaagacggagggaatggtgaaggaaagcacaagagaaaatggacagaaccgttacttcctcacgcctgaaggggatgggttactggaagccaggaggagagtgtgataagagccacttttagaggagctttcaccttcaggagaaagtcagggcccaagaagacccacagggaggtgaccagggaatggcatacttggactaccctctcttctgttcctccactctcctgccagggctccacattggataaacccctgcaggggcgagtgaaactgccacccaggtttgcctcccagggcacagcccatggagagctctaaggcaagtggcagaaaactagcacaggtgcagtgcgtcttgcaaagcacccagcctatgccggccctgggctagaaatgggaagagaggagaccatggcactgccctcaaagatcttagagtctgtggaggagtcaggcagagagagggggtgttcccttggcaaaggactccatgagcagatgcaggccatgggcgacgctcctgcagaagctttggggtttgccgcatgtgcctggaaggagcgcgcccaccttgacatgcctcgcctcctgttgccattgacaacgtgaaggcaaactcctggggctgggcctttttccttgagataaaatatgtataattctctgttatcaaatgattattaaacaaaatctaattgaaaaaatagaaagaagaaaagataagtcatttatcatcctgttctccaaagacaactgtgaacagcttggtggaactccttccagtggctttccttggagctttgcctctgtggatgtggtaagagtcggatgcgattttgaattttgagattttgattgagcattgttgtagtattttgccatgttatgataaatcattggcaaacatagtttttgacggctgcataatattctgcataatattcataataatgaatgctagtatagttcatattataattcttctactgtatttatttatttatttatttttgagatagagtcttgctttgtcaccgaggctggaatgcagtggcgcgatctcagctcactgcaacctccacctcctgagttcaagctgtcctcccacctcagcctccttcaatagctgtgactacaggtattcgccaccatgctggactaatttttgcattttttagtagagacggggtttcaccatgttggccaggctggtcttgaactcctgacctcaggtgatctgcccgcttcggcctcccacagtgctgggattacaggcatgagccaccacgctcagccttcttctactgtttaaatgtttaggttatatcctgtttcattaatattaaagaatgctataattaaaaactttgtgtatagagaatttttccatgtttcagattatttatccaggatgatgtctctaaaataaagctactagaggttgaagtatctagcccagggccagccacagaatagacacaacttggttgataactattgttgttcagtggtgagtgtttatgtaaagctcttctgcaattaagaactgctccaaagtccttcctctagaacagcgcttgaatatgatgtgagccacgtaattctcaatgttataataaccacatttcaaaaagcagacacagttgaaattaattttaataataccttttactggagctgggcatggtgtcaggcctgtaatcccagcactttgggaggccgagttgggcagatcacatgagcccaggagtttgagaccaggctgagcaacatggcaaaacctcatctctacagacaaatacaaaaattagccaaataggtggtgtgtggctgtagtcccagctactcgggaggctgaggtgagaggatcacttgagcctggggggttaaggctgcagtgagccaagattgcaccagcgtaccccaacctgggtgacaaagtaagaccctgtctcaaaaaaaaacattaattaattaaaacaaacataaaaatacattttacttaaccgattatatctaaaatattatttcaacatatgattatatgtaatcaacataaaatttatcaatgagatagtctacatttttttcccatgtaaacctttgaaatctgatgtatagattttatgcttacaacacagctccattcaaaccagcctcattcccagtgttcagtagccacgtgggtgcctgatagccactgtggacagtgcaggtctagggcaaggaacccaccagagatatttgccactgttggcatcttcacctagccctgaaatccagccaccttttaatgcctccccgaacccccttactggcgttctggactgagggtggaccgggtggccaggtgtgacatgacttctgtacctggacatttttaccagtcgtcctcattcctgccttgaccttgaccttagccaatcacagcatccctctatcccagtgtgcctggcactggttcattcagagacattgcacacttcccgcatggtaagccctgggcctgaccctagggatacaggtggacaaacagaactttcttgtaaaatttaattacagaacttgtcagtgtttttacggtctagtgggggagacagactttaatcaaatcatcacacaaatatatatagtttctaaatgtggttaagtgctacaagggaaatgcacttttaaaaatgctaacactgggtcatggcatgagtggcccgccctgaaggcatttaataaaggtggcccagcccctggccaggctgtcttagggaacattcatgtgaaagatgagagtgagataagaggatctcagtttccttctggtatccagggtccctaagctacattaacagagtttctaggacagacagtagctcaccggttcctgtgtctggggcccagttgatcaatttgttgtttgtcatctctaaaaagtattgcggccagctggaacataaaagtaatgaggaaacaggccaggtgcagtggctcatgcctgtaatcccagcactttgggaggctgaggtgggcgggggatcacctgaggtcgggagtttgagatcagcctcaccaacatgactaaaacctgtctctaccgaaaatacaaaattagccgggcatggtggcacacgcctgtaatcccagctacttgggaggctgaggcaggagaatcacttgaacctggaaggcggagattgcaatgagccgagatcgtgccactgcactgcagcctggggaacaagagtgaaactctgtctcaaaaacaaacaaacaaaaaagtgatgaggaagcagaaggctacccattcattcattcattcattcatttgttcctgtgttcacgcagcaactctcagtgagtgctctgtgggatgccaggcaggctctgcacagtcagaatggcaaagtcagccttctctctggcagattacacactgccaactgaacacacttttccggggaacatatccacttaaaagagaggaaaaatcaatgctaatagaactccttatctggttccaaaaatgacatcgtccgtagtggctgatgctttgagcccatggctgctctggaggcatgagccctgcatggacacaattttgtaagctcctcgaacctggccaaatcaatcaatgagaggctgcagcatggagagagtctgggttccaggggcaaactgtaccattcctcttctaacctgaaacaggacggagaccctcccttcaacctccagcccctagggacagggtaatttcagctgcacctgatgtaccctatacatcactgtcttctccaccagctctcaaattaaactctgatgtataaagttaaacaaaaatgagataaaatttggcagaggttgaagagggtcaaagtagtccaaacataaggtagactattgcttcttttgatttatgttattctgtacactgagaaaaaaataaaattataaatctccccgagactttctcattgagaatgaggcattgctaattgattttcaatagactcccagggttttcagctgggaggagcactatagctgttgtttgtagtgaagatgccatggttcgacctcggacatgtactgtgatgatgtaaaaatatcctgcaaaattaacatctgcaggcagtgatgttgaaaaccaccctgccttacctggctcatgtcacagaccacagtgtctgtccttccttattttcttatttaatccttgcaaacccctaatatgtgacacacagaattcactgtccccttttggcagttagggaaactgaggcttaaagaaaccacgtgtcttcagtaaatattagcatgtctactaaatggctgggacacagaagtgaacaagaccagtaccctctcctagagaccttcttccagtacaagagacgataatcaagtcaaatgactaaatataaaggattattagtgtgtagaattaattgtgaggaaatggaagtgggaaaagggatagagaaaaaggggtatagaaagccaagggagggccttaacaagggaatatttaacagtaaaacagtaagatttacttttttttttttttttgagatagggtcttgctctgtcacccaggctggagttcagtggtactatcaaagctcactgcagcctcaaactcctgggctcaaacaatcctctcacctcagcctctcaagtagctgggattataggtacacaacaacacacctggcttattttttaattttttgtagagatgggatctcactatgttgtccaggctggtcttgaactcctggcctcaaaggatccttctacctcagcctcccaaagcactgggattacaggcataagccaccaagcctggcccaagatatacatttttaaaggatggtgaaggctgctgtgtgtagaactaactcagggggacaagggcaacatcagagagaccagttagtaggctgtgctcattttctggacaagatatggtggtgagttgggccaggtggtggcaggagtggtaggttgcagagcttagaacaattttgaagataaggtgtctccaagggatctgttcctgctccgttgctctttccacagcacgctacctgcagcttctgctggtatcactgcaccagactctggagcacgctgcttctctggaggaggataaagacagggaggctatctagggagataagactgcaccagcaggcagcaggggcttccgagaagagggcccctagtcctggctgcgtatgtgcttgtgtgtgtcacttgcgatgtgcataatcatcttcagtcttatttttcccaggtaactgcaaaaggtaatttccagctcatttagctctgttctttccctaagctcctctagtctggcttttgtctctgccactcctaccaaaaccactctgctcaaggccatgatcaatgtctccattgcctagtccaggacagtcagagctgctctgggacagatacaccagatgcatgagtttcctgatagagcaggatctcagtggaggctcgatgcccacctgcctgatgctgtgggatggatttctgcacagatgcaacctctgtgggcagaggccaggatgaggcttatgtggctgtgaagacagcctttgatctgttttctgatgcaaccacagtgctgcaggccctgcttcatcttggaggtttgatgagtgcagacatgagaggtttctaggtagagctgagccctgggctctcgagtctcctctgtctgcatatctgcatgtggttggcaaagtgccagccaacctcagtgcaaccctcaccaagttctcaaggaacagcctctgaaagtccctctctatgctgagttctagggaaggaaaaggaactcagggaatagaagagctgatctgcccaagtcatacatttcttgggggcacaggaggactacatctctcatgctcacttgaaattaactgtggccactcaaattaaggtttaccagatggaacatgagcgggagtgatgtgttctctctaaaggcctaacccatgaaaaacctattgggaacactcccccatgctcttttccattccatgagctggatgcagatgatggcaaggaactagggtgaggtggaaccacaaaacagagggagcttggatccctgaatgaccacatggacatacacatacaccaaagactgtcttgtaagcaagaaataaacatctactgtatggaacctttgcatggagggtctatttgttatagcagcttagcttaccctgactaatacaatccctgctctctgagaatttaaaattgcttcaaggagacaagactcactcatacaattctggaatggtagtacgtggcttcgaagaagggtgggttgtaaggtttggactttcagttctgaagtcacaagctataggcccttgggtattagactctcctattgaaggcctttttctggaaagctggaagatagactggggagaaggcccttctggaagaggacacattacaatcaagggttcaaaagtagggcttgaagcaagcatagatgagatcaacaatgttaattcctagaaaatgaaaaaggaaaatggcctttaaatacctaagagctttgactgctgcagggatgagacgaaggccagactttcataacttctctcctgtgacttcacacacctcagaagttttctggtgaggagccctgaacctgggtgtgtggggagttggtgtcagcttgctgtttctctcccatgccttttctcctggctaggaaccccacttgttgtctgttttaaccaataacttagctcagacttgaatgcttgattggaacagcaagtctccagctttctgcagaggtctttggggacaggaatatgatgaagtttctgagctgaggattctaactgagacttccagctctcagctgaacttcagacgtgttctttacagtcacagctgtgaagcttttcagggcaaggccctgaaaagctcagcttggatctgtctgtccctaccaggttctgggggaagggggaggagagcaggcagaacactcccagtttacagcccagggatgctgagtcctggggccaaaggtgttgctcatcaccctcgagccctagaagtggcaggacctcaggagaattcaaagtggtcttcctcttaggaaagataaacacttattccactggttctcctcttcctggacactccactcccttcttcccagactcacacacctcctaactgcaccccaatgaatggtgcttctctgggtcccccacagacaaacattggggagcagccactaaagacttgggttctggttccaactgctgattttgattaagggtgtgaccttggccctcttcatccccctctcttcttcccctgttcattcacagctgcttttgttaatattcatggtgcattatgtaactattgttcacagttgagccaagtagtgtactagacttgcttggttggtttcattctccttttgttttccctgaagccaataatcaactcattttcatttgcttggtgttgtttgcacagatgattaagttttcccttacctacctgcagcctgtcaagacaattttccacaagattgaacagatcagaaaatccactgggagcagtttcttcttcttcttggaggtgtcccctctgtaggcctctgacgttccagttcagttccctgtttgggcaacagcacaactatcatatgggcttttcttcacctccagcttggagaatttctttacttctctcatccattggatccactgcttcctggagccgatgcctttccctccttggtttcatcccttcttttgttggtgcacagcccccagcagctgtctgctaatgcagggatgacatctgggggttaagctagcaggacaaaggagcttctgccatttctcttctggataatcatcccccaacaaacaacaacagcagcaaataaataaaacaagaagaatgtgaaagagaaatgcaaatttcattttatacaaaataagcagacagacacaacccagtactgcaaagagtggaaaataggtgggagagagtcgaaggaccttgttctgctaggtgtctgcagcagggcagaagccgatctaccaggcagaaccccagagtagctcaggaatccaagatgccacacaaggcaaagtgaggtgtggcaggtcacaggttgcaggcctccatggggaatagctaggcccccaggttcccacccctgagcctgacaccttcccctgtccttttggaagacgggaagaggatccaggcaagggccagggtgaacacaaaccaaaacgagggggattgggggaagtttactcttgtacacagtcccccagctcttttctgtctggctcatggtccaggagcagaggtaggtcatgggtcaccttttctttatgtcctacaagaggtatgaattttaacacatgcactggttgtgtaaccagaacttcaatcaggatacagaagagttccatcccctcctgcccccgactccctcatgttaccccttttatagacaaacactccctccaccccttgcccctgggagccactgatctgttctccatcactgcaatgttgtctctttaagaatgtcacataaatggagtcatgtcatatgctaccttttgagactggcttccttcactcggcataatgcctatttatttatttatttatttatttatttatttatttattgagacagattgttgctcttgtcgcctaggctggagtgcagtggcatgatctcggctcattgcaacctccacctcctgggttcaagcgattctcctgcctcggcctcccaggtagctgagattacaggcatgcaccaccacacccggcttattttggtatttttagtagagacagggtatcaccatgttagtcaggctggtctcaaactcctgacctcaggtgatccaactgcctcagcctcccaaagtgctgggattacaggcgtgagccaacgtacctgcccaatgcctttgagactcatccaaattatttcacgtattaggaatttatttttccttatttctgagtagtgtttcattgtaaggatgtaccacagtgtgtttatccatccaccccttgaacgacattttgggttgtttctagttttgacagttatgaagactattgctacaaacatttgcatacagggttttgtgtaaaaacagatttttatttcactggagtaaacacccaaaggtgggattactgggtcctatggaaagtgtatgtctaatcttataggaagctaccaaacattttttcagagtggctgtactgatttttattcccaccagcaatatataagagtcttgttgttagacatgtttgccaacacttggtattgacagtatttttttaaaaaatgttatcattttaataggtatatagtggtatctcactatgacttcaagttgcatttccctaacagctaattatgttgcacatttttatgtccttatttgccattcttacatctttttggtgagtgtctcttcaagtcttttgctcattttaaaaattgagttgttagtatacttactgttgaggcctgcgtgttctttacacattaaatattcaagttcttttaaaaaaaaaatacaggggccttttgtattccctaaactggaatgcagtggcatgatcatagtttactgtagccttgaactcctgggatcgagggatcctcccacctcagccttccaactagctgggactacaggtgcatgccatcaggcccagctaatttttattttattttttgtagaggaggggacttgctttgttgctcaggctggtcctaaactgctgccctcaagcaatcctccttccttggccttccgaaggcatgagaattacaggcatgagccactgtgcctggcccataaagatgcaagttctttgatgaataggttacttactattttttttgtcccaatctatagcttctggtttcattcctttaattgtcttatatagagcaaaagatgtttttgttgttgttgttttgtttgtttgtttggcagagccttgcactgtcacccaggctggaatgcagtggcataatctcagctcactgcagcctctgtctcccaggttcaagcgattctcctgcctcagcctcctgagtagctgggatgacaggcgcctgccaccacgcctggctagttttttgtatttttagtagagatggggtttcaatcagttggccaggctggtcttgaactcctagccttgttatccgcctgcctcggccacccaaagtgctgggattacaggcgtgagccaccgcgcccagcctagagcaaaagattttgattgtgatcatggacgccatcttcaaactgattcccgtctccattaatgtgcatttattgagcacctgtagtatacaggtccctgttgggggttgagctttacaagactgatggaacctggtgctcagagcatcctctaagatctttgcccttccccaggggaggaggtgctggtttagacccatagccctgagggaagttcgggacttacttaggtttttcaaccccaactatcctcagcttcaaaccaatgccaccgaattaccccctgagcattcctgtcttacccaccctcctttgcctaagccttgttttccttcactcaagcattgatctcctccttccttcctgggttaaccttgcctacaattcaaagctcagctgggataatccatcaggcctgaaagcttctccaacccaaagtttctatctctctgtctatggccttgtttgattatatcatcttttcttcccacctggtagggttttggggattaaataatatgaagcatatagacatgtgcagcaaaaagcctattagaaagtagattttccatgcaagttgctacaaaatcaaataagttcccagttcctgagaacccaaggtttgatatggtttgcctgtgtctccacccaaatctcatcttgagttgtagttcccacaattcccatgtgtcatgggaaggacccaatgggcataggtcttttctgtgctgttctcatggtagtgaatctttctcaggagatctgatggtcttacaaaggggagtccccctgcacacactctctttcctgctgccacgtaagacatgcctttgctcctccttgccttccactatgattgtgaggcctccccagccttctgccactgtgagtccattaaactttttcctttgtaaattacccagtctccagtatgtttttatcagcagcatgaaaatggactaatacaaagttccctctaattctatgttagaagcctgttttagaagggcttccacgattattttaatgagagcaaactggttcatgagtacaccgggcaacacacgggcactttcacaggaaagttaagagcatcttccgccaaaggagagccagaggccagtcaggaaaaggaaggatttcttaataataggaggtctttcgctattccagtgtcctgccgcaaaatgatagtacagacctggctgctagtcccctagagtgcccagtgcttccttttctagaactgagacaaataaaaagtaaactccagttctggagtcctgttttgcaggccccgttcccaaatgtcagctcctaatgggcaacagctgcctctgtggtttcttctaggcaagtgattcatgtctttgctcagaaacgataagcagaacaaatgtttgcttagacatataacagagggacaattggaaaacaggagactggcaactggaaatagtttgcagctatttgatccatgataattagtctgaattagtcatatggtgctcactggccaggcctttgggccagaggcagcgtgggggaatagacagctggtcttcctggaaaagaagtgcagaagggaacatagcagacacagaggtttgctcagaacacgtcagattggctcttgccctctcaaaggtgacccgtcttgaccatctgccttagttgcactccataccggatccgggtccccagcctggaaatgagtggagaggcagaaactacacacccatgggagatgcctctaaaatccattaacaattttttacacactcagaagttaaagtaaacaataggttgaattttgtgtgtgtgcaggtgggaaaaagcttcaaaaatatccagacacccacattcattggattttaatcttagggatcatgttaggtatactgactcatttaagagatatatggaccttgaatttggaacctaaaagtgggactttgagtggaattttcagtctgattatgttgatataatttaagatcttgtagcctacattatacttatacagaatgtactcctgtggtcatgctccaatacattatttagcagatctatcataaatatttttctttctgtgagaaaaggtttcactctgtcccccaggctggagtgcaatggcacaatcatggctgactacagcctcaacctcctgggctcaagcaatcctcccacctcagtctcccgagtagctgggtctacaggtgccctccacgaccacgcccagctaatttttttttttttttttttttttttttttttgtagatactgggtttcgacatgttgcccaggctcgttatcatgaatatttctatgagaagggagaaaagtcagatacattcaatatttcagccaaaaaaaagaaaagctacatttttgtcaaaaacttctcagaccattttttgcagagtcaggaggaaaaacaaaaagtgaagcccacaaacccgaccccctcctcacctcagattagaatctgtaatattggaggcctctgggagtagaatttaagtcactaggaaggtggacacatcggcaaagccagcccggagctgagtagggcatcgactgctttaccagcaaacatgaacgaagctaattttgagcacgggatattgaaaaactcaaccctcacgtctcaggtggatttttctttttctttttctttttttttttttttttgagaaagagtctcgctctgtcgcccaggctggagtgcagtggcacaatctcggctcactgcaaactctgcctcccgggttcacgccattctcctgcctcagcctcccgagtagctgggactacaggcgcccgccaccacgccctgctaattttttgtttttttagtagagacggggtttcaggtgttagcctggttgttagccaggatggtctcaatctcctggcctcgtgatccacccgcctcggcctcccaaagtgctgggattccaggcgtgagccaccgcgcccggccccgaatttttctaaatacatgataagaggttgtaaatggggtgacctgctcctccctccttgcccacgagcagttccaatggggtgtctctctgcttggggctgaagcagatgtggctgcgggaggggaggtaggaaggtaggaacaggagcctgcaagagagtggtcttccttattgacgcagacgactgttggtttcaatgttcccagcctccctttcctccttcttctgttaacaacaccttggattttctctgagaaaagcacttttcccatattctcagtccctggtgcttggatgggattagaaagggctcttcctcctgcctcccctgcacccccattccagggagaacctggggtccagctcggtcagccagcatcctccagccaccaaggctggcaccagaagggctgctgaatattggatgcaggacttgggcctcatctccagcgatgcaaagcagctttctcccgtggttgctgagaggaggctgcggtcctggggtggtccatgggccctggtttcctccacgtccagccctgctgtaacagttctcacgacacagccgaagcctctggacccattgtgctggacctaccctgagaaggctcagttgactctgtgcctaatctagtttgatacttttgtctggttgtttgctcttaccccttgcaaaagacagtgtcatcacatgcactcatcttggccaaaggcggtgcgggaggaaaggcatggagatgacgccagaatttaggttccactttttgacactgagacctcccaaggggaaccgcaggctctcagtgcggaagccccctccatagctcccctgacctgtccagcacctgcctccagaggtgaggaggggctgtgcaagttcctaaaggcagccaccatggacaggtctcaccagtcccaagtccttcctctaggcccccatccacctccttggactggcagcagtgggtctcagctctcaggccccagaagccacactgggagtcctctgttcactgagaggcagcctgaaccacggaaaggagagacctgggtctctccagctaaatacccccattccctcctgctgtgcccatggctgtggcaccagggcctcctgccagcaggaccaccatgccctctgtgtcctctgaacacctccactcagagctgactcagttcagcaaaggcggagcatgaacttgtgaggagagacactaagcaggctggagtagctgaaacatcactttccactgctccctgggaaacggccagaaagattcctgccaggcccggaatccctgcatgcacttgatccccaagacctcaggaccctcttgccctccctctctgcacgacatttgctcttctctctggaaccctctacccttgggcatctcggagttggcttctgcttatgctgtttttcggatctcagcttgaaggatacttccttaaggatgactttcctgcccacacccaggccaggccactctgttgcaagattttgcacacttattcattcatgtatttagtattttggggcgtttgttgtttttgaacagcacttgcttattcttcctgactggatgtcacctatggccccagctgacatttctgtgtctgtctgtcactctgcgggtgtctgtctgtcactccgtgggctgtgttaaggacagtcttgtactgcactgtgttctcagcatccagcatatccacgtgggctcacagtgaacaaatgaatgcatttgtctgatggttctttttgttctgttttgttttgttttgagacagagccttactctgtcgcccaggctggagtgcagtggcataatctcagcatactacaacctctgcctcctgggttcaagtgattctcatgcctgagcctcccaagtagctgggattacaggtgtgcatcaccatgcctgaataattattgtatttttagtaaagacagcgtttcaccatgttggccaggctggtctcaaactcctggcgtcaagtgatctgcccaccttggcttcccaatgtgctgggattacaggctggagccactacacccgtgcagtctgatagttcttatatgcacttcttactctcatagtgtttttaaacaatttttaattgatgcctaatagatgttcatagttcttccatgacttaagctaaatcttgctcttcctggcctcagatatgtggccaagactcacatcctcctaaaagccattcccaaatgacttcaaaaaaaaaataggaggaggaattcaggaacaatccataacaggcaccacagtgaaacgccaggtgcagcaactctggcagaggaagggctggtctgggaaggtgcagtgctagggcgggtcccagaattgctaagctctgtgtccttggagagagggacaggggatggtgacagcttcaggccctcttacaaccgagatgattgcccctggccccaggattttggccgccttcaggagcagttggtgctgcagtacgtgctgcctcgggttgggtactgtgagctgccatcaccctgatgcctccatgggctgagcagaagacacgccgatgtgttttgattcatagcaggcgaggctatgtacattttaccaagaagcctgaatgtaaaatggacggatgttactatcagacacaacagggggcctacaagtttctaagtgcctgtgctgtaagtctgtcttgaacatatagcccagtttagcaatggagctggtgtgaacagctgtgtgtgtgtgtgcatgcacacatgcacctgtctcttgcacactgtctcttggctatggctacaaccatcccccaaggatgagataggagctagcggatggagcacctgggggctgggccagagcacacctgcaggtcctcagcctcacaggagtaatttctgtgggtctttctgctgcctaagttgaggatctacttgctggccactcatgcctgtccagcttttaaaacaatatttgtttacctttttctaagtatataaagtaatacatattcatagtagaaaatgtagaaaatttaaaaatgtttaagaataatatcatctgtaatccctctactcagagaaaatatattggtgcatttacacccagtttttcattaataaatattttgtaacaaaatttttgtgacctagttagtatgaccttattatttatttacttctgtatcttgcttaacaatatatcaagaacagtttcatatcattactgttccctggaaataactttttactggctgcatagtattccatcatttggatatattactatttatttaacccattctccaccttggaacatttaagttgtctcaattatcttgcagtagacagtagatgtaagtgaatgctcttatatacaggtttttgtgagtttctgattgtttcttaggaaaaccttaagacctttgttggaccaactggggaagaatttctttcctgctcaggctgctcagctgatagagtgctggcctggagcagctgaaagacactttgctgctttctggagaatgaagccactgggaaaccacataggagggaagagagagacagcttctcgatgatgtcatctgaacacctggatcctgctgtgcctggacttgcagtcccattgtctaccaatatagttcattgaattcaacttcagctggatgtcattcatctgcttccagaacttgtgtctaatgcagagctgaatgcatactctcagagttggaagtggatgcaatccacaaatctagcacccaaatttcttttttctgttcttttttttttttaatttgagatggagtcttgctctgtcacccaggctgaagtgtagtggcgcaatctcagctcactgcaacctctgcctcccagattcaagcgatccttctgcctcagcctcccgagtagctggaattacaggcgtgtgccaccacggctggcctaattttggtatttttagtagagatggggtttcaccatgttggccaggctgatatcgaactcctggcctcaagtgatctaccccccttggcctcccaaagtgctgggattacaggtgtgaaccaccatgcccggcctcaaattgcttttacagaggcaagtggccaccgagtctgtgattgggatcctcctgtggagacctgtggagactcgtggctcactacctttgaaggcagtgttagggtaatctctccacatttccctgctgaaagctctgagtgttagtaaattccttctcatattagctaaaatgtattttcctgtgccttttattcactgatggggaatacaagcattctttttgagggtggccaatgctagtaattccctccatacagtcagtgatggatagagttaacccatggttgctgcatgtagtactgtcacttgctgtaccaccaggactcaagttgatgctcaacgcaacattcttttgcagggcccttgtcctcagtttcccttcttttggggtgggctgagagagacagcttattcagcatgaagctgtagtatctacagtttagcaaatgtctgcggagcctttaaagcagtttttatcataataaaaatattttaacttataaccccagaaagagataggcatgggagtctttatacagcacagaaatccagatgagcataatttgaaagtcatttgaattgtaatgagtatttttaatgtaaacaggcaggaggaaaaacttgctgggttctcttgtagcacagacacccagatatatgtcttttgatagtgatattaaagtgtcaagggtgcataggaggctgcagatgtcagcggcatgaatgggcaaggcaatttctgtggttgcaggctggaggttccagcaggaatagaaaggcaatctctgtgctagatggcccagggtcactgcaagtctagctcctaaatgaaaatcagggacaagatgtggcctgtaaccacagtcactgctcttcgtaaggctggtggaaaggtgaactggaaaggtttttagggttagggagatacaggaactcccaaacatcaggcacctgatagcactctccacctaacatctgcatttatattgacctaatgcatctgttcaatttgtctcattctttgtgctcacacacatttatttgaaacaaaactttccatcattactataggtgaaaatccttgatcacttgccttgaatacaagaaaccattattaaatgcaagctagataattttgcttgtcttacagccatgagccttaagtctgttccccccacccccccccccccccgccttttttttttgttaaaaagatgagcaaaatgtgagaatgatgcaaaagagatcctggtaccaaaagaagccttctaactggatatcatcagagggacagaaagaattaaagtatggacaaatttctcaaagtggtattactgttatttaattagttgtccatgtgctacctaaaacctttcaactacatcttttatgaagtatcccatatggacagagtcaaattccctcatttaacagatggaaagtttgagggccagagaggggaaggggccctgctgaggttccaacagctttctgatgccttgttccatgctttgccttatttctgctgtccacctcatcagctcttaagtgaatgttgtggtccctaattgtgggattgcagtgtgtccagtcagggcagcctcttcactttcctggaggaaaaggcagtgtgatctctcactgggtgatctctcactagggtgatctctctgcatagggcacccaggctggaaactagcagggagctggccagcacacccagcaggtgccaggctgcagggagctcctgcttcatctcaaacacaagaacactcagctcaaagcacaatattttctggcttagagtttggctcttagagtggcagctgttcctaccaaagcaaacattgaaaatctgtaattttcagaaataatcgccaaccctcaaaaaagatgtgtttacaccaaaactcctccgtgtgttcaccctgcattcactcagtgtcgagttgcagttttctctgcacttcatcgctctgcttcctcctgaacaattgcttttgccagggagcatcagcacagacaactagatcctgagcaatgaccagctgggctcctccccaaatggagccagataattttgtgttaccacttctgcatttttttcaaatcacatctatgcttaagcagagagcaaactctcaactccagcggccagcctatgggaagctataaaccttcattagttcagcttcaggtgtcttcatcagcctctcccgtaggtggccttgcaacctgatcttggtttcaaaattaaaaatgcagcttccttggccttctctggactcacagagcctacagttggagacttatgcactctacattttaaaatgggactcacaagcctgtgcacttgaggcccatgggtggatggcattgcctggctgggaaatgtcaatttcccaactgggcatccatccatccaccagccaagtggccagtggatctttgttgagcagttcctgtttgccgagccttgtgtagatctctgctgcgagggaggaggaggtccccaccttaaggagcttttaaggcttgttgggaaggcaaggcatatatctgaaaagccccattgcatgcaagttaactaacgatacaggatgatgccatgagacctctgccatccacgtaccagaacctgctctgctgatttcctggctcgatgtccatttgctgctggctcatgctcatattcacaagtcactcttgagagtcctttccctgtgccagaccccgtgctgagtttcagacacgcagggatggacagcacacagccttggccctccaggcgcttgcatccgactgtggagagccactcttagaaacccagggagcaatccaagtctgtgtgtgacgccactcctggacctggggaacacagagcccctgccagtgccctgggagctggtattcttgcagggttggagacagacctgtcttttgtggcctgttagtttccttgtggctgttgcaccaatgaccacaaacatggagacttaaaattacagacatttgtgctctcacagttctggagaccaggagactgaactcagcatcactgggcccacatcgaagtgtggcatggccctgcttcctcagggggctcccagggagaatccgttccttgcctcctctggcttctgctggctccggtgttcctgggcttgtggctgtatcactccagcttcagtgccagcaccttcaaatttctccgtgctgaattttcacatagacttgccctctgtctgtgtcaagcctccctctgccttcctcccttaaggtcacttgtcactgcgtttaggtcccaccaggataatctttgcatctcaagattctgttcttaatcacatcaacagagacccccttttcctcataaagcgacaaccacaggttccagtggctgggacctaatgtttcggggagcactgtgctgcctgtcacatgtggtttcctagatcatcaggcccaggctggccttttggatgtggccttaagtattcacgccacagaggctcattctcttgtccctgttctaccactttttagccaacttccccaggacacgtgtccttcctggtaaggaagcgcttggggtcacagatcagcctgcggctttgtggcctcctgggagacaggcccagcccggcccacctcctcctgtcgcctggaggtttctgagagctcatcgtcactttctcgtccctcagtgtgaatgcctaatcattcattgaaggcctgagttctgtgaacagaaagcaggttacgagtcagatccatggctggggtcagtgaggaaatacaaaggagattagggggacaaagaggggacagggcaggcagaactctggtaaggcaagcaggccaccctggcctcagccctcctggagcacggctctgctctgtgtgagacctgagaggggcacggggcccgtgtgcacctgtagctctccccactctgtattccgggggattcaggggattcgtaccacgcctgccagtggaagctctggtttttcgttttttttttgtttgtttgttttgtttttttgctttgttttgtttttaagagacaaggtctcactctgttgtccaggcatgatcaccactcactgcagcctctatctcctggactcaagcaatcctcaccttcagcctcccgaatcgctggaacacagatgcacaccatcacacccagctagtttttaaatttttttgtagaaatagggtctcactagattacccaggctggtctcaaactcctggccttaagcaatcttcttgccttggcctcccaaagtgctggtattacaggcatgagccacctggccaaaattctactttcaaaacaagcaaaccaaaggacctcatgctgaggccctgattctcactgaggcggttgcatcaatacaatgattctgatcctcacagcatctcaggggaggctccctgccctccagaggttggcctctgatggccatttcacagatgaagagactgaggatccgagagaataagcaacctaactgaggacacagaaagggagaaaaatggccaagtggccagggtgtggaagccaggcctggggattctctgccatgaaacattggctgtcatgactgagctcctagcctgtgaggacttgcatgtatgcacggcctggttgtgcatagaagggagagaaaggccggccgttagtctttctggacttctcaggctttggcctcctccgagaccctggggggctgccctttctgccttgtattcccccaaagtctctgcttcctaacaacagagtttgccttcttgcttaagacccagtgagcaggcttctgttcttgcagccaaaggagctttggtcccagcagtggtggtggctggggcagcgcagcctcctgcatgggcttggtggagtcccggggcccctgtgtgcaaggtccatgctcctccagctcccagaggcccagcaggggccagggctgggtcttgctgaccctgaggttaaagctaccactatcgctagggagagctctctgtgggctttcacaccccagaagtcccaggatacaagtctcctgaggagggcctctgggagagtcctgctggggacatggatccctgtgcggggggtattttatagatatgcaggatgctgaagtttcaatccaagccttttcacttcatcgccaaccaccctgctctctttagtaccagcaacatcatcaagtcaccgcagagaagcaagtacccctgggcagccttgacccccacccagagagactcaccaggttacagaggctggaatctgatggggtgatggttgttggttggggtttctcaggtttaaggagaggattttccctacccataccccccaccccattgccattctcaagaactcatcccagttgcccggaagaacatcccaggctgagttatgttgtgtgaccttctcaccagtctttgcagattagaagtagggtggacatctgagccaagccatgccagtgttctgtttgtggaggatttggagttaaggcggggaggccctgggagccagcctcctgtcttcaaggtgccagtgacttagaggccatgggtttcttccttttgtcctaaaaacatagagagggctgatgcagaggagaaccacaggagccgagggagaagagatgccaccttggggctcctcgtgttcccaggtacaggctgtacgtctggaaggcagggccctccttcctgccttgggtttccccaaaagtctctgcctcctaacaaggtttacttccttccttaagaaccaatgagcaggcctctgttcctagctgccaaagggcatctggccacagcagcaggagctgtgcagccccatgcgtgggcttggaggcctcacacagcttctgcatggagggcgaggggctcctccagctccctgaggcccagcagggcctggggctgggtcttgctgaccctgagggtaaagtcaccccagtcatgaggggaagggctctgtgggcttcctgaaggacatacgctttggaggtagagcagggtggcctatggggagagggaaggaacagggccacaagttgtcccagaacatttggctgttagagggagtgtatcagggcaggaagggagatggccctggcgccggcagctctggttagcttcctctgcatgtcacatgtccacatctccagagttcctgcaaggacaacaacagtgccatttaagtgaggaacctgaggtttagaggacatatttccttcccagggctgccgtcagagaacagtaactggttgggggagaggtgggggcttaagacaagagacatttattctcccactattctggaggccagaagcctgaaatcaaaatgtccacagggctctgcgccctccaaaggccctaggaagaggccttccttaccttttctggtggctccaggtgttcctgggcttgtggctgcctcgctccagtctctgcctgtgtattcatgtcgtctttcctcttatctcttggtcttctcttccatctcttaaaagagcgcttgtccttggatttgggcccacctggataatccagcatgatctcatctctagatccttaacttaattccgtctacagagaccccttttccaaataaggacacattcacagatgctgagggtggcaggtggacatgctattttggggcctcatttaactttctgcagataggctggctgattttccactgtcacgcagcagtaaatatctgagcgaggtctggaaccagcccagtctgactgccatgatatttgctggatacaacatgaagatatgggaggagagggagaaaggccagggcagaaagtgcctcccaacactttcagtatttcctgcactctctgggaaaacataggtatgatgatatttattctagatcaatggctgttagagaaaagccagggtgggaggccctgggacggccttcactcctgggtccctgtgctcccacatatgttcctacatgaaccatggcctccctctcagaagatgccctcagatcccatgggtgcattgctagcaacatccacaggcaccgggatcttgagcactggagcggccccaaaggggaaggtgttggttggtccaggaggagagcactctccagggaggtgaagggccagaagcagaatggagcagaattccttctactcaggctgggctgcaaggagaggcactgcccagggaggccgatagtgaaacctggtgctacctggcagtcagtctgcaaaagggaggaggctgtggagaaccctgtccccctacctacatttctgtcaccccagaattgttcatgcagtgctttgacactgccagcacctctgacctctgaccctctgtagaatccaaatgcggaactttatcagggatccatgcccacccccagcacacacacacacacacacaacacacacacacacacacacacacgtttttgtgggatgagtctgagaggaccctccagggctgtccacgtttcccactccagccctccttcctttaccttcacacttggcctcccgacttactctcaacccacctccttggtgtgcaaactaacaaaatgcacttttctgcccaaactcccctacatcattaagtgacatagaaagttcagttcaatacgggggaaaattgaatttatcttggaaatgttttattcttccaaaatttcactttggcaaagtctaatgcatagaaaagcatgaaatactacagctccagaccaagcaagttgttccactaagcattaagccgcagggtccgaattctgcctctctcccgtcaaccactctctttaactcaaatgcccatcaacgtcccggctaaatgtgagttttccacggatcgcatcttatcataatgtcacaaaacccatagaattacaaatcaggtttaaggcagaaaacatgacaggcaaatataagtacacaaaaagtacattaaggatccatcttcatttattctccgcattccaacctacctctccgcgcagacccgctccgtgcggcgctcagcttgaagtagcctcagatccattttaaagtggactgaaatataaatgacagttcacactgcacatgaacatagacaactgtataaaatatttaaataaagacaagaaagaacagaggattgcagcaaagcctttggcagaaccggccttggggaatttagcagcttgagattcattacaaatatcatctttaatgttatttttagttcaatattttgtagcactcagaagtaaatcttggtgcgctgtctcctctcccctgcctttctctccttgggtgtctgatccttcagttgtactgaaacctaatacgttttcaataaaattgatttgtgacgtcgtaatgctgtttgtttaccatctcccattccttgttgtaatgggagagaactattgcatcatttggcaaagtgaggaggattgctcttgattgctgaataaattgacatgaacctggaaacaaccctgttgcaatgtgaaaatgctccattgagccttccctccctcctgcactctcccattttgaagttctcgcctggtattccagtcctgagtgctaagggatcatctgtcctcccgaaagagagccattgtcccaaatatggatgcagaagagagagaaaacttggttttaaataattgctctttggtttctttctcagtgtgactcttcatctctagctagtttgccacctcaggaggaaattctaaaaaatggcatttgtccccaggtgaggggtaggagaggaccagttgactagaagccctgttctggggtcattttgcaaattcttcagtcttccaggggaactgcagggagagttaaacaaagctctgtccaggaggcagctggcaagatggaaaggaaggcagaaaacattgccttgctgctcggccagctcctggggtgtatgagtggaagcccttgaggaaaggacagaccctagtggtttttgacagagcagagctggggtttcacgtttgtcactccagggcaggctttgactcctggcccagggaagtgaggggctggggagagaggctcagacgggagctcagagcagcctgggaaagggatttttcaacccagatattaatgggcccatgatgtttcctagatggagccctcaagggcaagccaccctctctgtgacttggtttcttcacatcaaaaatgagtctgatgccctttgcccttgactttagtaggatttctgaggaagaaggaaaaaaaaattctcttttagtattgaagttatgtttacatatgtaaaagcaaagggagagaactcaggtggtgatttgggtaatttataactaaataaagcctaatagtgttttgtttatttattcgtttgatttttagagacagagtctcactctgttgcccaggctggagtgcagtggtgcattcatggctcactgcagcctccatgtctctgggctcaagcaatcctcccgcctcagcctcctaggtagctgggactataggcatgcaccacagtgcccagctaatttttatatttttctgtagagacagggtctcattacattgcttaggctggtctcaaacttctggtctcaaacaaccctcctgtgcctcccaaagcactgggattataggcgtgagccagtgcacttggccaagcctaatcattttaaaaacaaagatagttagatatttcaactatggaacaaaaaaatacccaacggttgttgtagttagatttttgttgttttgtttcttatttatcaagagaactacttcaccagatattgtgttgatgtggcccaaggttaacaggaaaaatcagaaggactcaggtatctgagaacatgagtaccccacgcagccaggatgctgccagtctaggaaactgaggtgctggccaggggagagccaggcttatagaattcagaaccggttctgggtggcctttggaatgtattgtgatatggtttggctgtgtccccacccaaatctcatcttgaatcttagctcccacaattcccatgtgttgtgggagggacccagggagaggtaatttcatcatgggggccggtctttcccatgctattctcatgatagtgaataagtctcacgagatctgatggttttatcaggggtttccacttttgctttttcctcattttctcttgccactaccatgtgagaaatgccttttgcctcccgccatgattctgaggcctccccagccatgtggaactgtaagtccaattaaacctctttttcttcccagtctcaggtatatctttatcagcagcatgaaaacagactaaacaataaattggtaccagtatattggggtgttgctgaaaagatacccaaaaatgtggaaatgggtaacaggcagagactggaacagtttgaagggctgagaagaagacaagaaaatgtgggaaagtttggaacttcctagagacttgttgaatggctttgcccaaaatgctgatatggacaataaaatccaggctgaggtggtctcagctggagatgaggaacttgttgggaactggatcaagggtgactcttgatatgttttcacaaagagactggtgacattttgcccctgccctagagatttgtgacactttgaattaagagaaatgatttagggtttttgccaaagtaatgactattacttttgcaccaacctaatagcagaagtcaggtgcatggactgcagcctgctaaaggctatctggttggcacaccatcagctacaggcagcaggactttgcaagtgaaatctctttctaccatttctctaccaatcttcaatctgcattctggaccgcaaagacaagaaagctcactgtgccacagtccgttttgagcatatcagaggataagcatgctacataataatgggtcaggcagaaggaaaagctgacttcttgcagctcacatcgtaggagaggaaagggtcaagttcagagcagcagaggcactgtttttgccttttttcccgtgacatgacaccattccacttaagtagctgctgtcagattcaatgagaaaatacgtgtaaagcattttacacactgtctggcacatactaaccactcaataaatgttagcttgttattattatcattttcctaaatggagaggtcaaaccaattagctgagattttctttttaatgaaaactctgatgagttaatcattgtgaggtagggaggctttgaaacccctgttaactgggatgattaaaacatacttgattaagctgaggcagtgacagcatatagattttcttacaggccaactccaaccgagtcatggtggtggccactattgttaagaagggttctgaggctgaacaaggcttaggacgagggagttttcagatgaattagtcacatgtgccttgcacaccagagatatgtgggcaggggtgatacatgacattcctgtcctttggaataatcagaattcatggcttttattaatcatagagcttcaagaaaacagattagaaaggctgcttagctccataagctgcaaatgttagaacagaggtaagatgagaaagaagtttccagaatgtgccaaaggtaaatatgcttcttcaacgttgtctggattttcccaagaagaaaaaggaggagaatggtgatgagaagaagatggagaaggagaaaatcctttaagatatgacttacagaggcattataaactgaaaggatcagcgtctagaatgtgtgcgtgtgtgcgtgaacacagaaaaccataaacaaataagaaaaagacaaacacctaatagaaagacaggtcaaggctaagacttcttagagaaaagccaatgatcaataaataaaagctgctcgatttcaccagtggtccatgctgtgtgaactaaaacagcattctatggctccaaattggcaaaacttttgaatctgacagtataaaggattgggaggatgtgagaactgggtaggggtgcacacaactcacaagcccttaggacagcaagttggcaacctctagcacagctataaacgtgccaatcttctgctgttccagcatttccacactaggtgtgtactctcagaaaacgacagtcaatgagtcccatggaaggatgcttcccatagtatggtgcagtaaacatcaaaagccaaaactagccagacagccccacaacagggaaatggtgcatagcgaccagacacaagatgtatggtttacctctgagtaatagagaagtgtccacgtcatgtttatgtagagaacaagtatggcacggaggacagtccctcgtcttctaccaatgccgtacgttttccatctaaatacaaagaacatgtcctgaaggccacacacccacagataattatgataatacagaatatatggcggattgggatgggagagggtcagagaggactttactcttatctgtaatgttttaatattttataacaataatgtgttcatgtattctttgagtaattaaaagttaatggctcatgcctataatcccagcactttgggaggccaaggtgggcagatcacttgaggtcaggagtttgagatcagcctgatcaacacggtgaaaccccgtctctactaaaaatacaaaaattagccgggcatgcctgtaatcccagctattagggaggctgaggcaggagaatcacttgaacccgggaggcagaggttgcagtgggccaagagcacgccactgtactccagcctgggtaacagagcaaggttctgtctcaaaaaaaaaaaaaaaagttaatttaaaaagagcctcgactcctggatttacagagcacaggcaggcggctgggggtggtcagctggatgcacgtggcgatggcaatgtctctgcgtccacagcagcctctggcccttttccttggctgttactggccatgttcatgactgagctcctttgaaatgtgttcactggggaagagcagtctcctgtttcctgttgctactgcttgaaatcatgatttcagagcccaggctgtaggatgggcagctgcctcttccctaggtgggaacagaatactggcccagcctcttgaagtctccttgcaggttcctaccctcttggtactttagaggggaccctgagaagcagaagacatctttttattcctggaagcccctgctctccttgtccatggtgctggagggtgaatatctccaaatcagcacctccatggcaccacgtgtgggtgaccaacaactgctcacaaaggtttcttccccaacctctgggggaactccaggcagggagacctgtggaaatacctcagaggatattcctgtaatatggactgcttggacctcttagaccctccccacttgctcttgcattcaccaacccagcctcctcacggccagccagtcctcttcctggcctctcttccaggcccagctctgtgccagcgcctgggggaggctccattctcttaccctcctgcatgctttgttttactcccactggccaggagccttctggacctccttgagaagcagtctcaggccagctcaggctggggttggggagatgggctatggttgtttcctgatatgatttggaacttttgttctctccaaatcttatgtaaagaagtggcctcccatgttggaagtggggcctaccgggaggtgtctgagtcatgggggcagaaccctgatgggtgtctgggtgccatcctcaccataatgagggagttctcactccgagttcacaggggagcttgtttgaaagagcctggtacctcctcccctctctcttgttcccactctcgccatgagacacactggctcccctccctactctgccatgattggaagcttcccgaggtgtctccagaagccaatgtcagccccatgcaggttctgtacagcctgctgaaccgtgagccaagtaagcctcttctctttataaattacccagtctcaggcattcctttatagcgatgcaaacagatgaacacgtttcccctattctttttgactttctatgaccttcccggtgtccaccgccccttgtctaaacctatgctgtcgttacctgtgcggtgctgagtccccaatcaggccttctcatcaccagcaaccagcattgcctcttgaacccatctttccctgcacagcagcctggaggcactgcttccagggagaagtgctaaacacagagtgcccttgttattgttgttaatggtgaaatactcactgagggcctgggatagaggaggatcaagaccaactccggtatgcacatctttacctgctgtgctgctcagcaccttagggccaggaagggaactcagaggtgggtctggtccacagagccagggtgcttgggctgcagccttgcacagatgagactgctctctggttcaggaagcaccagcagctccgagtcaggtcgtctgggttcagttctgggcttggccacttagaatctggtgctgacagagtggctgtccctcatagctgaggctgaactctggtctgtttcgtcttgtgtgtggggcatataattattcctttcttacctgtctcctggctggagggtgaagttgtcatgcacgagaaagggcatttggaaggcccatgtttacaaggtcccttggtcctgggcagggacgttcttctgtagccttcgatccaggctcattcatcagtcacctgattggcacagatttattgagaacccatttgccaagtattcttctagactggaggaatgcagagaaaagcacagtccagccctcctgttattttcagtctagcaggaggggagggaaatagaaatggaagtgcacagagtggcaggtgctattaggggctgaaacaaaaggtgctctgggcacaccgtaggtcatgcggcccggggagatccccctcagctgacttcatctatgtcagagtgaacagcatggacgaaagcaccgaagtgtgagggagtatggtgccttcttcttcaaaaaggcacatttcagagtggctgatgtttgctaagggaatgaagttcaaggacaagctgtgcaggggagcaaatacaatttgaggcagttgatgccatccacatctccacagcactcacagggctcatctgtggaccaatttctactgcaagttcctccaaccctgcaggacaggcagctcagaagtgctagggagttaacatccccaggagcatccatcccgcattgggtgggaccgctctgtgtcccattctgcactgcatccccaggggtctcagcagatctgagctccagttacccctagcagcaagctgctcacaaacccatctggctttcttctcttccctgtctcacttccttgctcccccatggacatttgctgccattgccccccaaataaactactcaaagaagccagtgcctgcgagcccaaatctgaaacaagccagactgtgaaaaacctggttttgcctcaatactcactctgtatgagatccaatgggctgtcccattcagaagaagtttctgcatttctgtctgtttctgctgttcctgctacccagtcaacagagcacatgtcagcctccttccagccctgggacagccctgcccctcccttaccttgtcccagtctccccatcacacccacaccccttgtttaccaaatgttcgatcttggttatgttactataaaaatcaagcagctggcaattccagcttgattaccaggtctccagttttgattagtaaattactgtggtaatcaaggttaattctcgctgcagcgctcagcaatggattttatatttttcagggaaatggttttcctgcctgggatggagaacatttcattaaaggaacccaaagataggaaagaaaggaagtgagtcctggaagtatggagaatgggcacctgcaggtctcctctctctgtcctaccttccagtcggcccttggctggggtcaaggagccaggacaggacagggcctcctgagaaatactagtccaccacttctggcttttggagtgccattgagagaccagggaaaaactcttcttgctggaactgaaagccactgagctcaggtcagaaatcctagctgctggggggtaaaggggtcagtgctcaagatcagagatgtctttgggtgattgatatctttaagtgcttcagggggatgtgaaggaaagtaggctctgtcagtgcttgtgtgcgggcagcctctagactctagactccccgccctacgggatgtcactttctccagggaatgaatggcatctatggaaggggtcaggagttcggagagacacccaggcttgcaagagagctcttgggatggtggaaccttgcagctggatttcatttctgatttttgtcctgggtctagtatatggactgtggaccccagacaagttggaattaaggtgttctgacctacagatagagataggacaagagagaatgggggctggccccagcccacccaggatttctctgtgagctaatcccaccacctgtaactccctatattgccatcaataaatgtcagcaatgaatgctttgcctctagaaggtgagatttgtttttagtatctctttgggggatggacactgtcagtccatagaatttatatcaaacttttttagcagcaaagatgtgtggcagtgaaggttatggtcagtgcagaggtgctcccacctcatcccactctgagtcaaaggaagctcacaggttgctctgctgccaaccccaccctctatctgtccttctctcctacacatccataatcgccctctggaccagagcacgcagctggtcctaacttcacctggatgtaaagatgaagcgagtcgtcctgcaggctccacccttcactctgctccatacagtaggaactggtgtgcacatggtgtagactctgttctggggagtctcaccccagaaccgccaagcaggaagaacagatgattaaaacccagacctggcctttgacttggtcatcttgttttctgggggtctcaggaagagactgccttcttggtgtctccccttcccagattactgtctccaatttcaggagtccccaaagcttattagcacctttacaaagtgggtgtgggtgaggtggagtctggactgggaagacctggagctagcactcctgtctggaggtgagattgatatgtcctcattctcagtgcccctgtggggccatgcctctaggaacagatgtttgctcaggggaaggacaacatgtgtccaaacctcatttcaaatatgttttgtgctgggtatggtggctcatacctgtaatctcagtactttgggagtccgaggctggtggactgcctgaggtcaggagttcgagactagtctggccaacatggtgaaaccccgtttctactaaaaatacaaaaaattagcaggatgtggtgggcgcatgcctgtaatcccagatacttaggaggctgaggcatgagaatcgcttgaacctgggaggtggaggttgcagttagccgagattgtgccattgtactccagcctgggtgacaaaagtgaaactccatctctttctctttctctctctctctctctatacatatatatatatatgcacatatgtatatacacacacacatatatatgtgttttgttaggcagaaagtgaaaagcctttttcctccccactgcaaaatctgggtgtcccgagacccctcagaattctcggacaggatcttggatcttcatctctgtgcctttggcagccacgaaaccccacccatccttcaagtttccttacaacaaaattatgctgtgctcttctggagtggcatgaataaagccccatgaaagcagagagtcccaagaaagggcctaattccaggaagagatggaaactcttgcaggtccccttgcttaagaacaattaagccctgacacgtgcttgggtggcagggtcaggagaattgtctgagggccactgcggcttatgacaggggctgccagtttccttctaactctgagaagcatgtgagctggacttaaactccatccagcattgtctacatctccctcacccttgctagctttatgaccttgggcaaggcacttccttccttgtacctcagcttcctcctctgtcaaatgggtattatagcagtgattaattcacaggactatgttaggataaatgaggtaagacatacaaaaggctttcaccttttataagaaatagtgcttaaatgtggcccatcaatatttcttaccccagcagggcagtattatgcaaatctgtgcttgcatgatgtgatgtttgctgatgagctggtagccaaagccagcccagggtcaatgtgggagagcaaggacagcgggaggtctgactccctgaatccaggtgtgctatgaattccctttgtcagcaattactacaatgtctgagtctccggatgttcttgcatccttgtgcctcacccccttgtgtccagtggattctttttcatccctctttcccgtacgttttgtcttgaactacacaatgtcagtgggatgaggtgcaggagaaagagagtggtcttaagagagaagatatctttggggtagatgaagaatccataaactgcaagactactttatgggccgctagagatgaggaaaaagtagtcataccgaaatgtgttttgggaggctaaattttacacatttgtttggtattatgcaaattttcctttgtagattactctcagcagagaaaagcaccatgatgtcagtgccacgttaaagtggttagtgtatcaccctgcagcaagactgtggaatcagaaccccagaacaatgacttctggcattgtctctctattagtgattgcagctgatgtcattttgccaaacaaaattataagcaaaatggatgttttgggtcagagtgtgccaaggaatataaagctgcatttctttcaataaatcctgccctcttctgccaggacaaagacatacaacctatggtgattgacgttttcaccactaaattatactatgtctatttctagaagaaatgtctccattccaaaattagcaaaccatcaacataacataaaataacatgaacatggtgtcatttcgcaaagatattgattcatgtagactcactggattaataactggtttcccataaaaggagtagtcactatgtctttggtagacagaaaaaatatacactttagaacaatatatattggtacctttaagcctgattgctaagctcaaataaacagaagagttttcagaggaaacattgcaaacgaagagagaggtgacatacggcaatgtacaaatggatccaggagtgatggaaagctaataaaaaaagacaactatttatttatttggagcatttgattttactctattggattacatgaagctctaatttttcactgcagtcaatctgtataaaagttcaactgattgaagcatatatttaattcctaaatgccttttctttcaaccccctacttcttcaaagttggacctttagtgtcttgagtagcaaagaggtttggcttatgttggagcaaccagacccaaggaggcatttaaatgctgtgggtgatttactcagttcctaacgacagccaatccactcttttctcctctaggactggatttgccaatatattgagaaaatatgtttctttgcattttttttgatgttttcttcaatgaagttccatggtaataaagtaattgaaattaaccttcccagtttactcatggcatttagaatgaaattcaaactccttaccagagactgttggttccacatgtgttggttcagcttgcttttctaagctcacctctctctactcttcttgccacacccagggttggccctttccgtcaaaggaacagtgctcatcactgcccctctatttggaatcttcttccagcctttcacattgctgcaaccatcttgtcttttggcctttgctcctcaaagacaccttccttatccatataattttctagaaaaatgaccaactgtccatgacccactttcattgaattattgcattttaatatcatcgtctcttccctctggaatataaaccctttgagaaagggagagtccttatggggcttgttgatggctgtatccctgtggccccgcacagtgttggcagacagaaggtgctcaataactgaatggatacacttctgggaggaagattcagaaacagaaagcaatctttttgactcagttccaatttgctgtcatgtttttgtaggataattgtcttctttatatctcaatttttcttcccttaaataagaagagtggtgtttatatgctgtccagaaatggtgcacagattaagtccattgtaaaacaaaacaaaataaagctatctagttatttatttgcttttaaaaaacttttctggtttcttcacaataggcttaagaggtaagagtttgtttaacatagaaaaccaactatgactgtgaggacacatctgctctagggattaaagctaactcagtatgtaaaacatccctttggaaatggtcatatgtgtcttcaggggatttgacaactggttctcccatttgtttttcattgttgaaacagatcattgtttctgcagttgaatactggattaagtagttgtattaaaaattaacattttaatgcactaaaatcacagaccacgagacgaccacccaaggagacacagaggaaatgggacccagaagagactgcatattcattggttcccattttatgtttatttctggacaaaagctgattgagtaagctggcaggtagactagcctacttcttcaaccattgtgtttccatgcctggcctccaccctcttcaactgggaatagattattttcattaacccaacagtagtgattccccctgcagcttcagtctccagttatttgtagctgaatctattgcttctctggaaaggattgcagatagccaatggccttccaatgctctgggtggatttgctggctgtagtcccatctggaggcaatggaggggagtgcttccttggatatctttctccaggtgaaaccatttggcaaggtctcagaactctaggaacagtctggaagcccctttttttgccaatgttgggaatgtcttgcccatcacagggatttgtctgctttggaggttatcaaacctgaaattgaaggcagtggtccagcaggatttaaagtcttttctaattggcagaacctggaaataatattgtgaatctggaaccaaagggcccctattgccagtgcctttggattctagaaatgtgagctcaatagtacctattgaatagtccctaaatctctgtccttacctcgcaggtcagcagttctagaagaatctttctggacaaaagacctggagttggcacttttggctgccactcaacattgaatggcctctagctgtgacccatcttgggacaagaaaataaactgtaagtttggaaaatgaagacttttaaaaagattagactgggagcagtggcccgtccttataatcccagcactttgggaggtcaaggcaggaggatcaattgaggctaggggtttgagaccagcctgggcaacatagcaagacctcatctctacgaaaataggaagtattagccaggtgtggtggcgtgctcctgtggtcgcagctactagggaggctgaggtgggaggatcccttgagcccaagagtttggggctgcagtgagctgtaattgtgccactgtactccagcctgggtgacagagtgagaccctgtctctaaaaaaataataaaaaataaaaagattagatacctgctggacctcatttgcaactggtaaaatcagaagctgtcttccagcaggtgtttatatgagaataaaataagagagaggaggagctgccccagaaggagaagtccccaggaggggactctcagccagtcacactctgcagcccagtggactgtttcaggaacctcctctccaattcttccacccttgcctgctttttggttcccaacccccactcccacagtgattttgtaattttcattccatccttcctgaagataaaagacaccatgggtgggatccgtgaataaaagtcgttatttatcgatgccggttttggggaacatttttccttctgattcatgaaccacttttctacattcgaaaagcagttcataaatcgttcagcaccggcagaaattaataataatgaatccatttacataaaatagtctcatcctgccaggtgctgataatatttgaagctggaatctctttaggaaactggatggcatatgtgcgtgtgttttcctatacatcagacctcacaccttccttttgtgagttttaccagaaatttaattatttagtggccagtcttgatcactgggagatgctatttgcaaaactggggaaagataaaaataagagaaatattgcagtgtcttaagaagatagttttaagccatgagagttcgtgtctagtgaaattaaccctttgagtagttcagagaaatacagctacccacggaatcattgagtcctaagaaggatcgtcactatcttatggctcacatatgctcacactcacacaagcatgaacacacacaggatttttttgcagtaacaaaaatgaatgcatacatcgtaaactctattttcaaaggtatatgacaaagagcataaattatattataagtaggtcttatgtaaaaaaaaaaaaaaagagtactgtgatcagacgaactggtgcaacataccaattaacacaaacaagatagggtgcctgcctccagagtagcacactccacaaatggactgaagagtttggcagaaatgttttgcttgagtactttttttccccagcaggaacagaaggttaagctctcatactcctcagtcattagaatctgattaccactgtttgttacatggtccctttcttgttttgtatattgatcccactttatcctctcatgctactcctattcctataggaaaacatgcggttgtgttaaatgtacatttttgttttgtttgcatccatttttaacttacgtaaaggatattatgttatttacttggttctgtatctttcttgtttcatgaaacacagtgactttcacatgtacccacattgttctgcaaacatgaaatctgccgcttcaccatgatttcacacacgcttatgttgttgctctctaaatgtaaaatctgctgcttctggttgtacacagttctctctaatgtccatccattcttccagttggctgtctccaattctccatccctacagacaatgctgcagaaagagtcttttcaaacaggtgcaaggatttctttgggatatatgtccatgagcagaattgcagggtcactgcatgtgcatatattaaatttgactaggttgtgccagatgctcctgggtggctggcagctccagtctacattcccaccagcagtgtggggagtccatatccttgccaacatgtggcattatccaactgtcttgtcaatccgaaaagaatgaagcgctgtctcgttttaatggcatttgtttctaattgctaataaatgtgaacatctctatatgtgcttattaattagccttttgaatctctgctctaaatggcctatttacagcctttgtacatctctttccttctgaaattgtttgacaacttcttattgatttataggcattctttatcagtttttgacatcataaacttctccaaatctgtcactgcctataaactgtctatagtgtcttcagttgagtagaagttctcctttttcctctatagttgtacagtcctgtggtaggcagacttccaaggtgccacccagtgatctctgtctcctggtactcacgtggttgtgaatcccttcatatcaagtgtaggctgagcctagtgacttgcttttcatggatggggtatagcaaagatgatggcaggccactccatgattagattacaaatgagtgtgacttacagcttgctagtagactctattgcccttccagcttgcacactttgacaaagacggctaccatattggacaggtccatgagacaagaaactgagaaaggccaatagccattgagaaacggaagcccttagtccaacagcctgtagagaactgatttttgctgcaatcacatgagcctggaagtggatctttccccacttgagccttgagatgactgaagctccggccaatacgtcaattgcagcctggaagagaaaccccaaaggaccctgctaagccacactggattcctgacccatggagataaagaggcacattgttgtaagccattcagtgttgggttattttgtcactcagcaacagatgactcatagcaattctaaagttgtaattttgacacttaagcctttagtttatccagatttcactcctctgtagtgttaggaagagatccagcttaatttttcaacagaattggtcttgaattccaaacctgctatttacattctgtttcacaaggtgagataatgtatgaaaaattgcttaaggcagtgtcttcctcccacaaagaaaaggcagctacagatgcagttatttgctattatgcaactcagtgagaggccattgtagaggatattctccaaaactccctgacaatgagtcacttcctgattgataatttcacatagctgcattcttaggagctcacttgggaacctaaaccatggagaagttaagattttgtcccagaagtctcctctgagacataggtcctctgagacacaggctactttaaggaaaagataaaaaatcacctgggttctgttcctgactactgctgactagctgtgctgtatggagtgggttcactttcctttccttttctttctttcttttttttttcttttgagcctgtcacccaggctggagtgcagtggtgggatcttggttcactgcaacctctgtctcctagattcaagccattctcttgcctcagcctcccaagtagctgggattacaggtgcgtgacaccacatctggctaatttttgtatttttagtaaagatggagtttcactatgttggccaggatggtcttgaattcctgacctcaagtgatccacccacctcagcctcccaaaatgctgggattacaggccactttccttttctgtcttagtttccccatcctttgaatgaagaaggcaaatagggtgatttcactttcattccatccaccactctgttccctgagaagcagcaggaaggccttggagaatgaggattttcactctagagctgcagaaaagcaggttggaattcaccttgtgagactgaccttgggtagaatcaggtcagggcctgattgctctgtccttcctctgccatgtcctgcttggtgctcagtatccccccttctacatgggacctccagctgccctagttgagtcagctctgttaaaatagcttacaggccaggtgcgttggctcatgactgtaatcctagcactttgggaggccaaggcaggcaaatcacttgaggtcaggagtttgagatgagcagggccaacatggcaaaatccggtctctactaaatatacaaaaattagccaggcatggtggcatgcacctgtaatcccagctacttgggaggctgaggcaggagaatggcttgagcctgggaggcggaggttgcagtaagtggagatcgtgccactgcactccagcctgggtgacagagtgagactctgtctcaaaacaaacaaacaaacaaacaaacaaaaatagcttacatatcacacaatggtctctttcctcttataacagccacaatacatttggccataaatttttgtctctaattttcaagtctgtgtctgctgggggagagatgaagtgtgtgcaattctgaatcactttaatgctactcaaagaaataccactcagtcagtcttttggagtcattcctcctatagaacaagccccagtgctcacctgattggtagagacagataaaggagacacccacacaccaaggtctttttggatgagtttgaaactttgcaaaacacctggcagaatcgtaagttctagtctgagcagctcacaatacgtatgaaaggccatcagagaatgtgtgcttttgagacaggttctcagaaaacctgtgggaagcatggctaaagtggtgtgaacataccctgtagttaccaccacctgggacttccacattgaacaggaccactggtggatctggttagagagagagagaatgtgacagactgatgtggcatctgatagctcctgcttcccgtggaagatctcttcagttgtcacaaaggatccgcaagctccagtgaaaaaccaacagctacagaccctgttgagcccatgggggctgcagagcactgtgcttgctgaactctgccactgagctccatgcactgtctcaagtaatcctcaaaactgccacgtgaagtaggtgctcttgtttcccccattgcacaggtgagtcatcagaggtgcattctagggtcaatcagaggggtgagacaacagcaacgataaaccaattcatcttcaattaaggacaccatggacaaaaatatgactgactgggaaaagacattggcaatgtctttgactaccaagggattgtatttaggtaatatcaagaacatcagccaacaaagagccaagaaataacccaaatagaaaagagacaaagtgcatgaaataaaagaagaaattcaaaatgttcactaaaaaataaagagatgctcaaatccacaaataatgagacattaaattaaattaaaacaatgaggaagtaggccgggcctggtgctcacgcctgtaatcccagcactttgggaggccgaagtgggtggatcacctgaggtcaggagttcaagaccagcctcaatatggagaaaccccatctctactaaaaatacaaaattagccaggcctggtggtgcatgcctgtaatcccagctactcgggaggctgaggcaggagaattgcttgaacccaggaagcagaggttgcagtgagccaaaattggaccattgcactccagcctgggcaacaagggcaaaactcctcaaaaaaaaaatgtggaggtaccctatctgtatcattagattggcaaaatatgaggcatgtggatggtgctgttacaagaaaggggtccagatccagacaccaagagggggttcttggatctcacacaagaaagaattcagggtgagtccatagagcaaagtgaaagcaagtttattcagaaagtagaggaataaaacaatggctactccatagacagaacagccccaagggtagctggttgcccatttttatagttatttattgacattacactaaataagggatggattgttcatgcctcccctttttagaccatagagggtaacttcctgcattgccatggcatttgtaaactgtcatggcgctggtgggagtgtagcagtgaggacaaccagaggtcactctccttgccattttggtttcggtgggttttagccagcttctttactgcaacctgttttatcagcaaggtctttataacctgtattttgtgctgacctcctgtctcattctgtgacttagaatgccttaaccatctgggaatgcagcccagtaggtctcagcctcattttgcccagcttttattcaagatggaattactcttattccaatgtctttgacagtgctaagctttaataggttgttggggttctaggagctcccacacggagtcagtgggagtatagactgatgtaggtatctggagaacaatctggcagaggggagtcaacatgagaatctgcatccccggagcaggcaattttgttccttagtacacattcccaagaaattctcacactgctccacatagggccctgagctagggtattcacagcagccttgcctatggtggtacagaattgaagcagcctggatgcccatctctggggcagggatggaggactgtcatctggcagatgccaaccttggggggatcatccagccatcagaagtcacagactatgtgaacccatgacaacaggcacggatgtgaaggcacagtgctcagcaaagacagcgggaaacagaataagatgatgaatgcactcccattgacacaaattatccaaaatgtttgacagtctgtattacacaagtggaatgggagccagttcctggaatattgaccctttcattggtgggctgtaggagattcaataatagagctgggctggcctgagtgttgaacaaccaaccctctggggacatggggaaggggcattttgccaaccaagatgacaatattttcaatattttaaccatagatctggctgcactggtgcattttggctgaatatcaaccctaggtggaagccctgagcacaacacccttggtcagaacggtaacaggacactctcctgttcatggtagggggagaaatccgacagtggggtaagagtccaggtcctgtgggagtccaaacttgcagggcatagacaggagtgatgagctggatgacacttgtgaacatggcataaggggcttttcaaaaaaaggcctcaacccaaagagtaactcaggatagaaattcagacactttgaagactccaggagctgaaattatttgtgtttagggaaaggcctctccaacttgtccaagtgacaacagcatatgtccacccacctactgctctccatgtaggtccaccgtggttagagcaagtctgacaccacccacgaagtctggatgggagtgacagattcctcctgttcaaccacaccacccccaaagggattgccccccgcagatgttttctgtaacctgctctgtaggcaggtgccaggtatggatttgtgagttggggtagctgtgatttggagacacaggccattggtgttgagtttgagacctagtcaagctgtggtctcaggagttccaagaaagtggataggaggttggacatcttttgtggctggggaggaagcccctgtgtgagtactcagatcggatgccgagacgcatctgtttgtgctcattctgtgatgacagggacacattgatcctatgcttcgctagctcacaaggggctgggagtaacaatcaagcagtgagtatgtaagacgaacacaccacaatccccatcattagggtgagtggagtctggatcatctgccctgtcagggaggcagcagactgctgggaaaaactgggtgcattccaaacacaatcagatcctgcaggcgttacgggccttctcaaatccacattggtccatgccaggatgctggaatgccaaggggccattaccccctggcccttctattccagtctgctgtgaacgctcctttggaaatggtagagaatttgcatttatcagaaaattgcttacttactctaatcatctatttgtaaggttttattttagctagataatgaataagactaaattgatgtcaggcatggagtaattttaaccaataccttcagaagtctgtaataccaaatattggaaaattatatgtagggtaatctaaataatgagatgttaaaatttcttggatcccaggaactcttcaattcattttttcctctctctctttcaacctcactgtgggaggcgccatctctgacatctttatatatgatgttctcatttcaaaatgccactgaaccttcaaatgaacacttgcgtatggtccttgaatacaaaaatacttaaatcaagatttttatattttggtgcagccagccagaatgcacagagagagatgggaagatttagctcagaagcctacccaggaaggcagaaaaggtccagctaagggaaggggagaggcaccgggctagcaaacagatacacgtggagatgctaaagatggaaggaagagtgtcttcctttggcctcctgtaacctggagcaaacacaaaatccaagttgcaaaggaaaattccttctcctgagactaaggacttcaaaagatgctccaaaaggaataaataccataaaatgtatactgtgtgcatcgcctgtggccagctcctgtgtctacagagaagaaagaggagatggtgcactgcaaggcaggtggagctcagtgagctcagcatgaagacctgggagctccctgaccattgcccacaagcttacttcactattctagtctcagagcaaatcgggtaaatagataatttgcatgagggttaaagaagagttaaggggatccaatgcctggatgagtccttgtccgctaagggcaaggaatggggctggtgcttgactgacgtgattgaacttgattataacagtgacagatacattggctagagtcacacctttttattttattcactttatctttatttttccagccttattgaggtgtaattgacaaatacaattatatatattcaaggtgcataacatgaggatatgatatatgaatatatcatgagacaatcaccacaactcacttagttaacacatccttcaccttgcatagttacctttttgtgtgtgtggtgaaagtatttaggatctactctcttagtaaatttcaagtatacaatgcattattcttagctgcagtgaacatggtgcatattcgatacccagaatttattcctcttatcattgatcaacatctctttccccttcctgccctcctcaaccctagcaataaaaattctactctctgcttctatgaattcaacttttttagcgtctacatgtaagtgagatcaggtagtatttgtctttgtctggcttatttcagttggacaattcaattagacattttgtaatgtcttccaggttcatccgtgtttttgcaaatggcagaatttcctcctgttttatggctgagtaatattccattctctctctctctctctgtgtgtttgtttggggtggggtgtcacattttctttattcattcacctgttggtgggcactagattggtttgatgtcttggccattgcaaatagcactgcatgtcataccttttcatagaggaggaaataaaagctcagtaggtgtaactaacttgccacaatcctatacacagggagtggccaagccagtgtgtgaaacctgatataactaggtctgaagcccacactctcaagggagttgccagggatcaagggaaaagctctagagtagagctatgtggctgagccacatatcccatcgatggagtagcctctgaatatttaatagtgactacactttgccaaaatgggtcaaatattttggaagtttaaagtttggagacaaaggtggaaaactttgtgtgtggagtaagaaacgttggtttattttggcactaagcccaccttggttttgttgggacagctctgcttctccctattattaggcagtggcctgccagccttacccaatactgcaaggaacccaaccagtgaggggagccgcagtcagggatttgggaagcgcagagtgcaggcaggtcccgtgggttggtaaagtcacaggaagagcagatttgatgcactttctgccttaagtgtccctttcctccattctctgtttctcttggttttgttttgtttttggaggagatactagaatactcatactcaaccttcaaaactcagctcgaataccaccgcccccaaataacctccccagattctaagaggtcagattaaaggctcccttagttcacaggcaccccatgcacttgctgttgtgtggcacggtgtgcttgtctgtctcccactgctaggcagcgagctttcagagcagagacacacatggctgttgcggaagaactggggacagatgaagcgcacgtgtgcatgaggctgtggtgcaggcaggggcagcaggctgcagcctggaccagccaccttgaggaagaagggcatccagactgctggtgacccatgcagccagtgcagagtgagagcccagcaaagtggcctttttgggaatctgatatggattggtacatgggggcaggggccatgttggccaaccagagggcagggtcgctcagtttgtgagtccttgcccggggctgtctgcatcaccagtctatcaggaagttccttcctgcaatagcagtgtttgagcggggattagggcctgaaaactgcaagtagtgacctcactccccaccccacattgatccattgactattgactagaaccaagactggaaaggtcttattcccttctcagatcctcccagtcctcagaaaagggtcagataaagtgcgaccaagacacagaggaagaagatggaaagggagagaaagacagagatggtagacaacaagacaattgtgatgcgaagggagagttccaggcaggagagggcagcattggagggagattcacctgagatccatgtaggaaaccaaactccagcccagcctctgctaccaagagggtcccacctcacccagttctgttctcccatgcatagaaaaatttaaaaatatattttactcttttctctgatactcaattcccctgaggaatattttttgttttgctttgttttgttattgttgttgttgttttttaagggaaaaatgttcacggaaggttataaaacacatataatttactcatggtaattgcccacatgttatttatgtgctgtgctggcagtgagaccgagaagaacgacttgatcaatgcattagtctaatcacggggttcctgctcttaatttcttttgctggtaatttccatactcaggcagcaatgcgtagaattatctcgatttacagatctcggggccctggggaaaatctctttggagccatttctgtctcctgggaaatttgaaatttattcaacactgagtttgaaagccctatgatatgggttcaacaactccaaataataccttagaaatttagtaggtctgtgtgacatttttccttttttaattagtaactttagggggctcagaaacggatcacagaacatttttaagaacaacttttggtcaacttgaagccaagatttggcagacttggcgtttgccgggaaacacacacaaagaaaaacactactctttcttttcttgttaaatccatgaaagttcctggcttggctttgccccgggtttgtaacacagtcttctaaggtggagtatttatggcaaatctattgaaagccatgggagaaatttcctgtaacttcaatttactttgacagaaggagacgcaacacctgctgttagctgaacctgctgaccaggctccgtctcctcaaagttttgggggagcagagaagatggtatgagcagaacttctttctcttggatcagctcctaggtttgttctagtgcctgaagagaacaggttgcagtatctccaactgcaaagcaggtgcgtggagccacattccttctgttgagcaaagcccttcagaggggcccacgggcaggtgagtcctcctcccttaacacaatatcacagacagtccagcctccaagcctcaaagggcagagcaaaagggccaaagaggagatggcaggcacagcctggactgtctgagatttcagatccgcagaggaaaagttggcaagcgtcgggaccaacattcttctaccattaacactcacctaggaataatatctatattttgggctggcacttcaggtttactgtctcgtataatctcaacaacctgggaggtagatgcattcatattcttattttgcagatgaggcaattgatcctccgacaggttgaggagcacctgcaaggtctcagacaggtggtaagtatcagaaagagagggtttaaatgcagattcggtctgattctgcaggagatctcatacctgaacaggtgagtcatcgtcacgtttcaggagcaaccaccagggcatgctgaacttcctaaggcagtagggtgaccagctgccttggtttgccggagactgggggtttcccaggacacaagacttgcaatgctaaaactgggaaagttctggacagactgggacaagctggttcccttatctggaagtgagaataaaacataagctactaagagtgctgtgactttaaactgtaaaatcaaaataagtagcaaaccagtggtttgtgggtaggatgtgagtctctggcgagtttctttttaactgcatggagttcctaaggcattttacacagattgcatttgaaatgccagagttgttgcatagaaagttggacctcgggctttcaaaaaatagaaagagcaggtcttggaaggctacagtcccagcaagggtgatggctcctttcgtaattctcagttcctgctggccaaccttattcattagaccatgggcttggctcttggagacagtcaatgttttccgtagagaatattaccccgcagtggccaggaagcaaatgccaatagatctccaaaatatttgatcataccaatggattgcctagaatatcctgtggtctttctgttgcctttgagagaacgtcatggaataccaggtgggggtggggcaggtgagctcagggtagcaaggattctgacatagcaaagggaaattctgtatgggacagactcaaaggtcccagatgccctctcaaatgaagatggcaatattccaaatattcattgatccataagcatctcacggcaggtataagatctgggagaactcatcttattccatccccaggaaacaaacatcccttcttgggcaatgtctccaggccacgcttctcatccgcagagcaggtgcctgttctccccgggccatctgacaggggagatagaaaatctgcaagagaaagctcacagcacggggctgagccctggaggggaagcacagaggcctgtattctaattcactgatgatcaatttgcaagttctttttctcttagttcccttagtttccttccaggtaatgcagaattccttgaagcttctctaggttgttttactttgcaatctttggtcagaaggtctttctcatgttaacaggtgagttaaggtaagagccccagactcctgggcttcccccagcccactccatgatcccaaaagagattccactgggggatacagtttgaatcacctgaactagacaattattacagcttctcttccaggttgaatatttcagggtcccttgccaaacaggggaagatcttgttaaaccaaaatcccaaatagatttcaaatatgctggaagtttacatgaccctaaagactgctctccatgagagactcaggggctggggtagtaccttctaaatttccatgggaaaatgaacatgctccagcaagagcttgggaaaagaagatagtccctaagttttattgtttgaaatttgtcactcaaggatgtgaacgtgtcgctgacaattatgtagcatctcagagctcagaaagcacttttgcatcgattatttcatttcttgttcgtgccaattgtgtgaggtggacaacgttatgttcatatgagaaatgcagcccagagaggctcaaacccagcacttttaactcccaatctccctcttttctcagtaccatgtggtaagtctttattaaccagagtgtccaattaaccagaacatgcctgtgtcttagggatcatcccagactgattttctttgcagaaaaccccagggagccacagcctttcctgcacctccttttgttagctgtatgtttttttagcggcccagtgaggcctgcatttcagagcctgtgttgcaaagctcattgctgtggaggagacggttatgggctggggcctgggtcttccgccccttcctggcagaccaggagcttcagttgctctctgtgaagttcttctttgcaggagcctgacacagacgacagccccaggtaatccctattcttcaagaccaagccagggaaaatcttccagatgttcttgctactcaccccgaccttgcggtcttacccttctggctgaacaagagacaaacagctcctctccacttggctgtgtgcggcttaacgaatgcgtatgaagaccgtataaataattcacatcactcaagaggtggcgagctgaacaagtcccttctggttacatttatttcaagataaggtgaaactaagtgagtgatggcccagttacagaggccagggtccaaaggggattgggacactctaagttacaccaccagagtgatttgtgcagaactgtgtcaacttagagatcctggcaccttgggggaaagggaaatgtcttatctctaagaaaagtgatacaggatgagtattttccaagtacagcctataagctaattctgcagaatcaatttggctctgccaggaaccaagtttctgctttaatctaagaggaactctgaattagtaaccttgcacatgttgtcttcccttggaaatgtcactaagggactcttcgaagcatgggtgtgggtccttggtgtaggtcctctaggtgcatgaggtggcactttccagaagcatgggtgaacctcccaagggagtccagagtcttttattggaatcaatggatgagaaaaatattgttttgcaacttgagtgaatgtggcctccatgatcaaaacctggactagaaaagcctgtggagtggccctagaacagggcaaggtagagaggagagttttctcctgctgtgaatttaccactcattcctgtattgtagccacatgctttaattttttttcttctcccttttcccacagtgccccctaaatatttccactgaagacttttagaactttggaataaggaaattgtatctccagctgacaataaaatttacgaagcaaagaatgcctccgttaatactttccaaacgtctttgtttttgaacgagcaagatgctgagaaccttccaattcagtaaccctgcctctgacaggcagcagaacagttagcaaggttgacagatagatgcagccacacgatgcaataatccttgctgcactgaactttgtatttaaacacttattttatgtttaattaatttctccaaagaggaaaacttccaggctgcctttgaagccggctgtttgtttaagatattttgttttaagaataagagaaaaaaaggaaggaaggaaacggagggaaaatgtttatgtttttcctgttgttttttcaaatatgatgtgacattgtgaaaaggcctcctgaaagtgcaattttttgtttgtgatggaagagagatgcacctatgagtcttacatcatcaaagaaacagacgcttatctataatttatgctttgctttaagcttctgctgatctgatgtggcttttttaagacaacacaggcagccctggcatcacttgtcaatcatcggggcatgctcaaatcgtagaccattagcaggagggacggcagagtttctttaatgacgcttttatacggggcatcctggcagtgaaacagagagggtttgatttgatcaatgcattagcctaatcacagcgttcctgctcttaatttcttttgtcggcaatttccatacatgggttgcgttcagggttctggcaaaaacccgttcagaactccgtgtgacatgtgcagtcaccttgcccggatttctctcggtgggaagcgacgtctgcaagagaggggacggcggctgggctggatggctgcctttgagtccgtcctgcggtgaggctggggaaggcccattccacgcgagccttggcttcagccctgaggtgcctgccagcccccgtggcagaccccggccctgccaatttcagcccccttggtgattctgttccagcgctcgccaaaagcagaatccgtgtataatgaacaagtttcatgttcaacattttaagtgtctatttatgagtcccagtaattagccctttgtctgcaattctggcgatgatgattagaattccatctcacgttatgaatgctgctccccaaacttgtccttctcgcctggagaatcccaagcaggtgggcacctgaaaggcaaagaaagggggcgatttggggagtggccggtctcttcttttaccagccctccagcagcctccttcctttgatcccattcttccctggctgtatgtaatttcagacttctcagaatccattttcctggcttttgttctgaaacttgttttcttctcatcctccactgtcatccccaaagggtgcatttttttatatcatgccctacacatgatatttgtaccttttgcaaaatcttgtcaggatgctatgaggtttgagagtctttccaaacgaatcattctcagaatcaaaatattatgaaggaggccaaattatctctaattataacctccagaaaagtggagaactttttcaacaaacagaacaggggtaagcatcttacagaaatatttgcaagaaaagtaatattctttttttttaaagctatcaaatcatgtaagcatacaaataaatgtattttaataagggtaaaattactagttaatgagtttgctttggggttttgtatcttcggtacaaaaatatataaatgcttttattaaggttgtacctattattttctaaatgaacacaaacacacaatctaatccatttagcaataatatattttaacatatcacttactccctctgccacttcttattagggtacactctagaaaactgaataataatctgtaccacatagactctcagcatcctttatgactataaaaggaattcgagtttttgatgatatcacagcaatgtaaacagataattggaaagccagggcttcctttagagggaagccagggtcagccttggggcttggaattgggcagtctctttgcaaacttgtcttattccatggataaatttcttcccatttcccccagtacctggaggatggtggtggtggtttctggaggacttttctccaccctgggccaggacttctggggaggcagatggagtagccgtttgaagttctgagttcatatctttgcagaaagaaaagcatctccaggcttccaggaagccctggctggtggctgatgtatggacccaggcagggcaatgattggccagtcatgaaaaattagcctaactcacaacttcctgaagaatgaaggagaggagctgcgaaggcaaacaaccgtgggaaggagaggcccggttcgtggctcatgtctgtaatcccagcactttgagacactgaggcgggctgatcacaaggtcaggagatggagaccatcctggctaatacaataaaaccccatctctactacaaagacaaaaaaattagtcgggtgtggtggtgggcgcctgtagtcccagatactcgggaggctgaagcaggaaaatggtgtgaacctgggaggcggagcttgcagtgagctgagatggtgccactacactccagcctgggcaacagagcaagactccgtctcagaaaaaaaaaaaaaagaactgtgggagggagaaaaggccacagagcactctttccaagttagaacaacgcttgggcatttcttggttctgcccttatcttggtccatgactatggcttgtgtgtgtgtgtgtgtgtgtgtgtgtgtctgcttcagtaggctaattgagtatctaaacaaactaattaatcacaggaattcatacaagatggacaggtctggagaggtgatgttcatcaaacccctccatttgttttttaatccttgcagcaatttatttgctgaatatgcacatttcttccttgaaatttcctagctgtggccaaggttaactgtatacagactcattcagtatttatgattttgcatagtggagaagtttttttttttttttcttcagagtcagagaatctgggtgcattaatcaaaaataatgaataaaatgatccgtctgacaattctcatagccgcctaggtttcaggagaataacgaactaactttattaatcaacagttcctgattaattgttacaaagtgtcatccataaatttcccttcattttaataatacttgctgaacgctaacaatatccccagtgatttcagatttatggcagcctgggcactgcgaggagtgtggcactccagccttctctgctcccccgagcctgagtggctcttcaatcccagcctgatctctgttttcctggcacccctctttctgtgaccccttcttccccacccctctcctggctcctctgcctatgtctgccaggcagagaaaccaccggctcccgggagcacctgtgcttggcaccccagccccaccagggctccccacccatttcacctcttcaggcccagtttcatgaaggataacgtagagaacagcgccgcaacccattaaccatgacagtttcacttttctctcctaattactcgttcctgcctatttggcattttcttagaaaaatttgttgaataatgaccagcattaaaatggaggctcttaagaatttatacgcagagcttaatttatcatgtactttccttatcttgcagccgaatttatttctaagtgtctttgctatgcctgtgacagtgtagtcattttcttaagggcacagcatgtatcggtaacacatttaaaaatgcaacactatttaatcagaagaagctcaggctggtttctttgtgaattgtgtttgtttactgcaactgccggcttgacataaggcaattagtactaattgtttaacccagctgccttgctgagagcaaccaagaacttttgtactttatcttgttttctctagtcgctctttgctatccaattgctgccatatttgctcttgtttccagtgttttcaacagggtgtaattctgcttttgtgaaacgggcaggaggctgtcttcctcaagagaatattgtgaggaggacaatcttcagcaaagttcatctggctggctcttcttgtgggttgctgtgaggtctttgaaagccagcaagaaattgaggtcaaaatggacaacgggaactcaaaaactgtacgtgagcctgggaagacattctctcccccgcctgcttttagctaaacttctgcaaaaaggaaaatcctaaggctcagatttcaatgggttttaagttatgaggagaagctgtaacttcaggctaccatctgtctgcctcgaatattttacttcttgcttattctttgtcaaagtttgcatctataggaggccactgggagtaggaggaaaattcatgatttatcatgttttgatttgcttgtaatggcttaaatatgcttccacggagtctcagagattacatctttccaaaagagggaattgtattagaggtggacatgaagcctccccttggggtggcggagttgttgcaggatggctctggctctggctgaatcagggtgaccctacaccattgttgttcagccaccaggatatgatggttgtcctaggtgcatccctgtggaccagctagggtagcacatctccctgaaagattgcaaggaccctgaggctagacacttgatcacagcaacaatgtcatatacaggacactatggggcgtgtcttatagaagtctgttgaattactaccaggccaatggccaccaattaaaatacaatcatgcactgaataatgacatttttgtcaatgatggactcataaacaatgatggtcccataagattctaatgaagctgaaaaattcctgtcacctagtgatatagccattgtgatgttgtagcaaaattaattgattttttttataaatatggcatcgcccaagtgaacatggcttgtctttttttagacatagtcttgctctgctgcccaggccagaggaatctcagctcacttcaacctctgtctcccgggttcagggaattctcctgcctcagcctcctgagtagctgggactacaggcacaagccaccacacctggctaatttttttgtatttttagtagtgagagggtttcgccatgttggccaggatggtctcaaaatcctgacctcaagtgttccacttgccttggcctcccaaagtgctgggattacaggcatgagccaccatgctcagcctacgttgcttattaaatctacagtagtgtacagtaatgtcctaggccatcacattcactcaccactcactcaatgactcacccagagcaaattccagtctgcaaactccatttatagtaaggactctatacaaatgtatcatttttatgtttcatattatattttcactgtgtgtgttctatgtttaggtatgtttgaatacacaaatccttaccatgatgttacaaatgcctatagtatttagtacagtaacatactgtacaggtttgtagcctaagagccgtaggctatcaagctcagcctaagtgcatagcagcctctgtcatctatatgtgtgtacgtttcccttatgatatttgcacagtgatgaaattgcccaaggatgcctttcttagaatgtgtaaatgcaacattgcaagcataaagatgaacatcaaagaactcagcccaggtgtcaggggatgaaactccacctatgggtgccatagttggtaagtatgacagggagggatgtgggtcattttcccagcttatgattaggtttgttctagcagccaagagtacatgtgctgactccaagtgagttcacacatacagaaatgtttttctctcacataactggatcttcagagataccggacttgatgcatattctagtagagctcaataattcccctggaaatctgggtctttctttttttgaggtcagctttggctccatcctctggctgactgtgcatgtgattgctggctggtggtccattgcagccaggacggcatgctctcattctctttccaggtgaacaagaataactgtttctccaattacgggacattataagttgtttccttcattctgattgaatgcacccacgtcgcttgccacatttggaccaataacagatcccagaagaaaaccatgccgattggcttagaaggctgtggatgtttccaaggctaggaaaataactgagcagaatcaaggctgtgttggaaaggtgtgctggagaggagaccaagtgttacaactcagatctatcagcttatcaaaggaggaagaaagctagctcttgggtgaaatttcccaatgtttaaataaaggcagctaatgcaagttttgccctaaaaacgtcatgtaagtcagtggagcacggtggctcaggcctgtaatcccagcactttgggaggctgaggtgggtggactgcccgatctcaggatttcgagaccaacctgggaaaccccatctctactaaaatacaaaaaattagccgggcgtgccctgtaatcccagctactcaggaggctgagacaggagaattacttgaacctgggaggcggacattgtagtgagccaggattgcgccactgcattccagcctgtgtcacagagcgaaactccatctaaaaaaaaaaaaaaaagacaaagcaaaaaagcaaaaataaaaacaacaacaaaaaaaacaaaagcatctcacaggtcaatcatgtgatcatgtggcacaatgaagcatgattaagcaagacctgactctgattcctgagtctccagttctggttctctggggaagtaggaaactgatggaatggagaaagccaagagtgggtggaattccatccacaggatggtcaagaactctagacttgagaagctcttggcaagtttctccttccgtcttgtggctgtctgggaagaacacatgtaatacatttcagtaggctcccaacagcagcacctcagagacttttaaaaggtcaagagctttcttaagaactactggagagtaacttgggtgctggggaaaattaagattaatatacattggaagttaaatcctgccttttttttttttaccccctaggaaaactcttaatgttagcagaagcctggatcagctgagaaagctacaggttttctgttccaaaaatgcttttgttgctaattaaaattagtctaattttgaaatgatcacatcattaaagagtatttcaactgatgttgatttgatgatacctacaaacatcttagaataaagaggctggtgttttagcattaaaaggtgctctgattagacctaaatctgtgaaattgatgacatgagcttctggtacctcttcattcgtttttttccccttctgcataaaataattatgaatacttcactccatgcaatccacgtttattttattttttacagggttgggggagggctggattaagtgctagctctttgcttgtctatggtattgctctagcaatatcttaattaagtctagagtcaagatgaaatatgtgccccaagtatgtttctaatcctttcaaacttgcaggtttgatgtgtgatcctgggccaagtctttagaatggtgtctcttatgtcaataaatcttctgagacgtgtcagccaggtcattgacatctttggtgaaatggagaactggctctcagaggggctgcaggttgaaggcacagtcccagaggattttcaccttcttccccagggcagggctttttccacagtctcctctgcataaatattctgtgcattcatgtctcctttcctctacttgcctggcaggtcaactccataccttctcctcttggcctatccaaactctaaccacctgcaaaagccactcctgaaatcaagaaggtttctctcctttatctcttgcaggagttaccaatgatgccaaccatttggatgctcaatcaaagtactttagcagatttgtattaagtacctggattcatccatttgacacatatcatagaacccatgcttagagtaatgagaaaggcagacaggcagatgtgatcactgctcctaggacattcacattcagaggtgtgatagggagtaaacagtgaggcacacgcagcatttcagattgtaaaatgctcacaaagggagtgaagagggtggcaggacaggaagattggtgatagaaagccatctgaacaaataaccttttacccctctcccaagataaggaagacatgtccagtgagtggtgattcacttctcatgtttgggtatatctgataaggaaagtcaaggctgctgggccttggccatgacctaaggatgtagcagaacttcatgaggatgacctctggagaggatggctttggggctgagacctatagatgagaagggaagagcctttcaggaagtccatgttgtttcctggagtccactgtgcattcatctaatctttccacctcctagactgagaaactgagaatgccttaaaggccagattggctaaattcatatggatagggcctctgaattctggcagtgggtgggccttctaagtggtacccttcccagtagatacttgctgagcctaactgaaggagaagcagtccagactcttcccattccctaaagagaaaaaagttgagagcaattcaggatgacaatgtgaccctgagcatggaaacctcacttctagaagtgattatttttcttagacttcatgtcaccagtatttcgcaagttgaaatgaaaaccacagaggcgcttcaccatttattgcgagtgaagaaaaacttctaagcttcttttctgccctgactttccttctagactttagaacacctctcatggcccagccataaggccttcctcaacacagagtagggctgaaacatctagcttatggtgtgattatttggggccacactcttattcctttaagaccagcccctcccagaagatcttgcctgattcctccttaagaatcagtgcaagtgccctagaagtacaagcaggccaggccatggtgtgtgtttgcccaacaatgttttaagactctctagtacagtggggattgaccagagctgcttcctttgacctcaaagactgtcatatagtcatgatctggagagtctgtggattgagcacctgagccagagtgaccagcagcaacttgtctgggcatcttgcaagtaacttttttttggtttatttttgagacaaagtcttgctctgtcacttgggtttgagtgcagtggtgttaacatagctcactgcagcctcgaattcctggcctcaagagattcttctgcctcagcctcccaagtagctgggaccacagatgcacaccaccatgcctggataattcctttttagtttttgtagagataggatctcccagtgttgcccaagctgatctctaactcctggcctcaagcagtcctcccgcttcagccacccgaagtgctgagactacaggtgtgagtcactgtgcccagcaacaaaaaaccttttaccaccctccaacgtaaggaagaagtttccagtgaggggtgaaagacagtgacttggcttctcatgtttggggtatatctgttaaggaaagtcaaggctgttgggatccagccatgacccaaggatttagcagaacttcactgaatgttttgaatcagcccatatggcttcagattggatgtccctttggtgctgggctggacctttggctctgagcctctgcacaatcatgaatctgtacaatcatgaaaagcagagttcacatttccccactctgtgagctactagccacaatgaccagtaggtctcacgagtccttccccctacccttcccttgaaggcaacctcttggctttcatcatcatgtttggccacctttggggaaaaggtagaacagttaacatctgaggccactttcaagacaatatgtctcaagcttcgtcccccatggtggtggcacattgtgaaggagggaacaaagaaaccactttttctatcagggactttccaaagataagataattttgttcctcttctgacctataaaaaagttatcaaaaaaaactctagtaacattcattttcatctgcatattatatttacaatgattccagaatagaatacaaatacacacaatgagatttctcattgcttgggattgtctttgcctccaaacattccagatatatcacacagctgttgatttcaatgcccttggagagacacttcaacacacagtaccaagtttcaatgcctactttaaagaggaaccctgaatgcaggacagataatactttagctcttgatttcaatgattttactgtttgtattgaggttttgtggggtgtatttatttatttattcctgatacacagagtctcactctgtcacccaggctagagtgcggtggtgtgatcatgacttattgtagccttgaacgcctgggctcaaccagtcctccaattcagcctcccaagtaggaccacacgtgcatgccaccatgccaagctaaattatctctctctcttttttttttttgtagagatggggtctcactacattgcccaggctggtctcaaactcctaggctcaagcaatcctcctgccttggcctcccaaagtgctttttgtattcttactggttgcatgagttctagttgaatgaataccagaagtaaatattgtatggtatcaaacacgcaaggtagcacacagtgagggtgtaccaagtggaaatttaggaactcagctgaagcccaagtgactggctcatgtgaggctcccaccaagctgtaattatagatgagcggcaagccacccagtgactgtccctccaggggtctgccagtcctgtgagaggagccaggctctatggtgctgatcagcacactcccactttcctcggatggatctttctgatggacagcctgctggctcctgtggaaaaagagaggttaacagaaaaggacagaggaggggcaggggagaaactcctctgactggagaccatggtgtgcacaggccccactcgtctgtctgctggggatgatgcctggccctggtgtgtgaggtcccgctcatctgggttcctataaatctttgagaactctgtaagataagcccagggtcaccaagccccaccccatatcacgagtccagtatgggctgacccattccaacacccagtgtcagtatctgcatcactgtggcttggggctatttttttttttttcagagcactgaaggctactctgcctggacacaacaggtgggatgtgccaaggaaggaaggaacactcccagcagcagccctcagccaatgactatgcaatgagttgcagagaaccacagcacttccttcacaccccaccgggaacgtcctagcatctcccatggtgccaggcatcattgtggtggccatcttcacaatgcatttgctggtggaagaactgtctgtgccacagtcgcattcctgccagcatttcctagggagctgaataaggagaacacatggacacagggaggggaacaacacacactggggcctgtcggcgagcagggggagggagagcacaggataaatagctaatgcatgtagggcttgatacctaggtcatgggttgataggtacagcaaactactatggcacacatttacctgtgtaacaaacctgcacagtcagatctgtgttcagggtcagcttctggagcaatgcaaactgagacccctgaattcttagaatgtcagtcaggcacctggtgggcaggttcctggacctctcattttttactgactatgtaggaactcagatcaacttgccctcacctctgccctgcagtggatgttctggcaaggagatcagataaggaaacagccctttcctacagagagaaagaaccctcaaaagagaggatctggtagcgatttcctggagcagggttgcaaagagaactcctacttttagtaaaggaataaaggaaggttcctgccaggaaggataatgataggattttgaagggtctacaggagctggaaaatcaaatgggatcagaaaaatcacacaggtgggaatattccaggacaacatggagcaccatgagtaggtggttttggctggagtggatgaagggcttatgaagggaggagacctggaagagaaagtggcaaaagaacattaggaagatgcaggaggttgctgggccctatgcatcactcacagaagaatttagaatagatatgaagcatgtatcgatgctcctatctatggaattaaattgaaataagccctcctcggtctagctttggactcaagccattcaaaggcttaagggaataaaacagaaaaaaaagataagaaatgagttcaacctgtcaactgtgatgataacagtgattgcaacattgataaagtgctttagtagaaatatggaatttagaagaaaatgaaatgaaggcagcagactattctcactgacagtgatgttggcaagcaggaaggcttgactgctctgagatgggtcatccccagccaccccacaccttggggttcccacaagcctgggttcaggggcttagtttttcaggatgggaacccatcccattgtgttttttagctggattcaaaatctcccattctggaaatgatgggaagccaaggtcctgagttcactttattagttttggggagagcaataaaacagtctaagatagaaagtcagggcaaaggcaattgcctgttcacaggatctctcccacacacctccttggcttagtttcatggaggctgcatgcaagaaataactaagactcgtccaaggctcaggctgcctaaaatcagatctctgtatatctctaagcatcctggcaatacttccttggagtggtaagtccactgtactgaacggggatcagtgctggggttaaatatgttttttttcctttttccttttggtaaacacttttgaactttttatcaaagtgtaatgtgcatatggctgtggagaaataaaaatgcttttacactgttggtggggatgtaaattagttcaaccattgtggaagacagtgtggcaattcctcaaagacctagaaccagaaataccatttggcccagcaatcctattactgggtatatacccaaaggaatataaattactctattataaagatacacacacgtgtatattcattgcagcactattcacaatagcaaatacatggaattaatccaaatgcacattaatgatagactggatacagaaaatgtggtacatatacatcatgcaacactatgcagccataaaaaggaacaagatcatgtcctttgcagggacataaatggagctggaagccactaccctcagcaaactaacacaggaacagaaaaccaaacatggcatgttctcataagtgggagatgaacaaaaagaacacatggacacagggaggggaacaatatacactgggacctgttggtgggggctggtggagggagagcatcaggataaatagctaatgcatgcagggcttaatacctaggtggtgggttgataggtgcagcaaaccaccatggcacatgtgtatatatgtaacaaacctgcatgtcctgcagatgtatactggaacttaaaattaaattaaattaaaaaaaagaaagaaaatatccacattaacgtgatctattcttcaggaaaaatagttgaaaatgcaaccaactcttggtgaaatgtataaataaatctttgctatactttacttcaaataaattattttaaaataaagtacacaagacataatcacacagctgaataacttttcacaaaccaaatgcatccatgaaatcagcacacacatcaccaaataacattatcagtaccctcagaagtctcataaggccacttgcagttgctaatccccctcacccagaggaagtattctgacatctggattagttctctgttgcttaaaacaacagtatatgtttattatctctcatagtttctatggatcaggagttttggagcagcttacctggatggttctgatttggagtctttcataaggttgtagtgaaaatatcaaccagggttgtaataatctgaaggcctgattggggatggtgaatctgttccaaaggtggctcactcacaaggcttgtaatttgaggatggttgtttgtaggcttttatttctttccatgtggggcctcactaaaggctgcttgagtttccttccaacatggcagccagtttcctccagagagtcacgtgaagcccaccttagaaatcacatgatatcacctccgccacattttatttttttagaagcaagtcgctaagtctagcctgtcttgaaggagaggtaattaggctccatctttcaaagcgaggaatgtcaaacattttgcagaaatattttaaaatcaccacaacttgtaacactgtagattgctttcacctgtttttaattgatatgcaggagattgtacagtatcacatacagtatgtgatgacacacaaaagacattcaaaagtatgtcttttgtgtctgccttctatcagtcaacattatgtttgggaaatttatccatgttgttgcacatagttgcagttcattcattttcattgccatagaaaatgctacagtataactataccataaaaatgtgtatctgtgcaattgtagacagatattgactatcaggaataaagttgctatgacgaatttaggtttctcttggcttgcttgatggtttaaggccagctcatgactctgtcccatgagaaattattgtacagtggccttctctataaggatgatcaagaaacttgttactccccaaggaaagattgtaagtcctacactgaccaaaactgaggtctggtactagcagtcatagccactttgccatttgtgcaacattttagtccccttcccccccgaactttctttcagaaaatacaaagaggttaattagcattagtcacagtttaagaattagccaaaagcctccgctgtttgcaagctatcttttaagaagctgaagcaaaccccatggcatctgaagccagaacacttctctgagttgtcctgatatctcagaaaaggcctggaggagacatgagcaaatgagtgtactcatgggtgaaccatccagtgggaacagtcttgggacagacagatgtgaggttgcctagcaacgcagcatgaccagggagaagggccctcagagggcatctccaaacaggctgtaaagagtggcacacctgaaaggtgtcattccacatgaagatggagaggcaggtggccctgattcccgagaagtccctggtggaggtggagaggatgcaggcaccaggaataacattgggagctctttctttctcccagaaaatcacttcactgactcacactttgtagccctaaacactcatttctctgctcctcacactcacattcctctcatctcccagtgaggaagtcaagcagatgctgtcctgccctggtctcttctgtgcatacagccccacttccacctgctggagcctgcacttcagtgcctgaaacatttcttagggcactggagtcaagacaacagcatggcagtcagtttccctgctctccaacaaggaggcatcctctacccacaagtgccaggagttaatggagaaacaccgtggctgcccctctgatatgttttggctgtattcccaccctaatatcatcttgaattatagtttccataatccccacatgtcatgggagggacctggtgggaggtaattgaatcatggggtgttttcccccactatattctcacgagtaatgataatgagtaagttcttacacaacctgatggttttataaggggctcccccctttgctcgattctcattcttctgtcttctgctgccatgtgaagaaggacatgtttgcttccctttctgccatgtttgtaagttacctaaggcttccccagccatgctaaactatgagtcaattacacctctttcctttataaaacacccagtctcgggtatgtcttttttagtagcataagaatggactagtacaccttccctcttgcaagagggctcagggctgtgtcctatgcaggctcctgcagtgcagttccccattgggatcagacgttagtcgcccacagggcaaaccatttgataagatgccatttattggctctttttcttccttgcctcccctacccacctacccgtgttttttcacctcccaaataaaaaacttgcagttgagtccttgtctcagggtctgctctgggagaactgagacccacacaggtggtcctcagaatcatagcttttagctcatttgttgatttatttagtatatacatttattgctcttttgccctgtgccaggcatggtgcttgttgctggaaactcactgagaaacaaaaccccaaaggagcttcccttcctgttagggagacaggcaaaaaccaggaagcatgaatgtaatgatgggtaagagggtgaatctagtgagaggggctacttgagattgggggtgcagcaagagtccctctgagctgctcaggtttgagatgcctggccaggctcagcctctgtggggctctcccacaggaatgcatggctggccactgtccctccctgccacccccaaccccaatacctggctccatggctgccactcaccatgggctgctccttaggggagactcagccaagctcaggtccatgggccaagtgggtttcttcctatcactgcatcctcagattcaggctgccctctagctccagctctcagttggccatagcagtcttctaaaacctggatccaggtgttgtaagacatgggccacagaactgatgcatgagggaagaataaagaccaacgctcatcaagctatttccgtgtgccagactctactgggggcttcaaaatatatggcctcattgacttcacctaatatctgtttggagtaagtattttatcactggtattagagggggaaactgacactcagaggggcagagtgacttctctgagtctcagtgctaacacaagccaaggtttaggttccggtctacatgtctccaaacccattgtctctggaccacaatcatactgtgtacacagtccctgaccggagtctctcctgggacacttaactttcttttaaggactcttcattctcaccctcatgtccacgctggctcagtcttatcctttaagcccttatgatgcctcattcctccaggaagccttctgagaggaacaatcagagacagaagtcaaaggctggagcccctggcttgcttctgggggaacctgagctggaagtcagcagatgacattagagcctccctggccattgcttattgcctgggcacatagtgaataccactcaggacagggtccagagggcaaggctggctggtgtgtgctggcctctcccccatatcccaggctgggcagcccccactgtgtttccatagtgatgatgacaactatgatgatgaccttattggtcatcattgggtggccacattcgatgctcggcgttttctacgtaatatcttaggtaattcccctaccacctgctgctccacaatcaggtctgttgtaacatgtctgttctctaaaggggcagggcacagacataggtgacagctccatcaagaatcaagcggggatgacgcagtgggctgtgtcttgcacggcagtggagaggatatcactgaactctctagactcattttacaacattctcctgtcattccttgggaagtgttcaacaaagcttcttccctttgcattcatctgagcctggcttctgtcagtgtatgcgcttttcaaaaatgctgtcaatcccccacttcttgaatcagttaattaactagttgagtgtctgtttaagcagaggaaaacccaaattgcgtaggatcccacccacctctctgcaagtcaattcagtaaacattcaccgcagccctgctggcttgcccaacacagtggccacatgggagggacgtggaagaggtggccacctgggtcttgcccttgggagacaggtatgtgcccttccctggctaccaaacaggaaagagcatgtctggtgtcagctctgtccttatataatctaggaatgacaggaagcagtgctggcggtgcagaggggaatagagctacgccttgcagaaccgggtttcagctaagataagggtgactttccctttccgtctgcagcagggagtgcaatatgcacagttcactgggtctggataacttgcacagaaattgaagtgtgttgggagaatcataggaaaggctgaagaatgtgagatccaggtgacagaaattaataggtagctacttcaggaaaactctgctggcatgagatgggtgccaagtgttgaccttacctgtgtctgtccagattgaaaggggagggaggagaaagcaggagagggagcaagagtgagagagagagagggttgggagagagtgggagcctcaatgatgcccagcccctagctggggaagggcagggcccttggctggctgtcccccgaaaactgaccacagtgcctcaagagaactgtcccaatcctggtgttttccccagaagatggagatatggatgcaaagtgggtaaagctacagatacctgctccagggcgtgggggtggagggtgcaacttcgtgcctcagagagaagtgtgtgaagggcctgaattttccctgacaaacagcaagaccaactgggagattacaagcactgggttccttccaaagtctaaggaatcagaagcctccatggatgtctgggtctaggagaattctgagaaagcagccagggcatctctggaacatggatgagagactggaggtgaatttagtgttgtggaaactagagagtccaaagagtggtggttgtgaggagtccttgaaatattaagcatagaattactgtaggagctggccattccacttgtgggcacatacacacaagagttgaaaggagggacttgactggatatttcattccaaaaggtgaaagcaaccccaaaaatccatctatgtatgaatggaaaagcaaaatgtgggctatgcataaaatgggaggtattctgccttaaaaaggagggaaattctgacacatagggcaacatgatgaacctcaaagataaagataagtgaaataagccagttacagaagtacacttttgtatgattccacttatatggggtgcctaaagtagttgaattcatcaaaacagaaagtagacatgggcttgccagaaggtttgggtaaagggaagtagggaattattgtttaatgaatgtggagtttgtttgagatgatggaaaacttctggagttggattcacaacaatgtaaacacgcttaatgccatggaactgtacacctaaaaagattaaaatggtgaatcttatcttatgtgtattttactacaattaaaaaagaatacagagacagggatgggctgcttggaccctgtcaccagagacattcaagcagaagctgcatgactctagatcttggttatgaaatgagactcagatagaagataaggtttgtctcgcccctagactcagggtgatgccgtggaaaggcggctttgcagtcagacaaaaatggatgagtatcccagctctgcatcctagttagctgtgggacttggccgagttgcctaaattctctaagccttcccttcctttgtcatctgtgaaatggatgttccaatgactaccatgctagttaattgtgaggactaaatgaggcaatgtgcctggaaacaaaacccaatggaacccaataaaaaacatctcaggacaacagatacgcacaaatgaccctgagacatgaacagatgctcaatttcactcataacagcagagatgcaaatcacaaaggctcaacacctgaagatatcaattttgacctatcagactggaacatcccatggtttgagaacatacactacatcattggagaggccatagtgaaagagccacaagtattgctggttcaaagcaaaataatgccaaccctgtgtagggcaatttggcagtgtttataaatatataaaatcaacatttcctggtgacctacattatgagatatatatcatataattatctatctatctatctatctgtctgcctgtctatgtatctatctagaggttttcatcctgcctaactcccatagccattatcataatgttggggcacttcaggcctcaggagcagacctcagaaaacagaatctctctctgaccttcttcctcctgtcacctgccccataccctggagaaaaaaatactgcacagagaggccaaaaagaatctgaacggataggcctggctgggtttggatcatgccctttttgtccaatcacatttctacatgttgatcagtcacgcctattcagtgaagtctccataaaaggccccagaggagtgggtctggagcatccatgtggctgaatttatggagcttcctgaacggtggtgcccagggagggcatggaagctcagtgccctttcctttgtacctcacctgtgtatctctccatctgattcatttgtgatagcctttataataaactggtacatgtgtttccctgagttctgtgagccactccagcaaattagtcaagtccaaagagggggttgtggggaccccaacttgaagcccttcagtcagaagttctagaggcccagacttgcaactgacatctgaagtcagggaagtcttggggactgagccctcacactgtaacatctgacgctatctctcggtagatagtgtcagaattgaattgaaatagaggacactcagagaaatgcaagtggcaaagtctccatactctgaagatatcaattttgacttttcacattgaagcatccaatggtttgagaacatacactgttgggagaggttatggtggaagggctacatgtattgctggtttaaagcaaaataaaaccaaccctgtgtggggcaatttgacaatcattataaatatataaaatcagcatttcacactgcagtgttcactgcagaattaatggctcacttggtggtgtgaagaactccccacatattttagggtcacggaagtcttctgtgatgattgttgtgaagagtgagagtaggagaaaacacagtttgaggtttttttctcaaacacctggcaatctcactactgggaaattatcctacagctataccagcaagtatgcaaaatgacataatacaaagttttttttacagtagaaaaatgtataatatcaaaaaacttaaaacaattgaatattcatttataagggactggttaaataaactgtgtcatatccacagaaaagggacagtgtgcagcacaggaaaagaatgaggaagctgcgctaataatacaaagtgacaaaaagcaaaattcaaacaatgtgcctgtgagccacattttcttgtaagagagacaaggaggttaaaatgatatctgtagttgtttctttttgcctaaagaaaccctgtgaggataaacacaaaactagactaggcatggtggctcacacctataattccagcactttgggaatccaaggtgggaggattgcttgaggtcaggggctcagtactaacctggacaacattgtgagaccccatctcttaaaaaaataaaaataaaaaaataataaattagccaggtgtggtggtggccttctgtggtcccaggactcaggaggattcctttagcccaggagttcaaggctgaactccagcctaggtgacaaagccagaccacatctcaaacaaaacaaaacatgtaactaataaagccaagtaactaataaaaataatttcctgtaggtgaagggactggactgggactgagatatctctgggtatacttctaaattttagatcatgttaatgcgttacttacatgaactttaatttttaaaaaatgctaaaaataaaacttatgaaacttcattggagacataaaaagaaaatttaatgaataaattggcatattatgtttctattgagtctagagaaaggctcagtactctgaagacaatcaatttatttcaaattaatcaattaattcaatgcatttgtaatcaacaatgcaacatatagaatctgaaagagttattctaatgttcatcatacaggaaagaaaacaattctagaattgtcaggacagttttggacaaagataacgaggggtttatgttatcaaaatatacctttatagtagttaaagtgtattttaaatacattaattatattttattattacatggaaaaagaaagatacattaatgaaaaagagtgcagagtctggaaacggacccatatgtctatgaaaatttacagaataataaaaataaaacaagatctttgttttacaacattaatgcagtgaaatgcaaataggttagaaatctacagatttaaaaacaaaactttgaaagcacaagaataaaatgcagaataatttttagggtttgggtaataaagactttctaaagcaggagagaaaacttagacataataaagtaaaagagtaatcagactttattggcaatttaaaaatcaccatacatacagttgtttcaatttaccagtgacaaacagaaattaaaaattaaaaaaatatttgcaacagcattaaattttcacctcaaaaaaataaatctaatgaaaagtatgtgaggcttctttacaataattataaagtattatcattaataatcatcactatattaccttttattatttaataatgaaatcattattactaagatgtaaatgaatggatctatataccttgttcttgggttggattttagctatgccaattctctccagatgatttattatagttgatgtaatctcaataaagacatcaatatctgtttttggagaaaattggcaagctgacttaaattttaatgagactataaagggctaagaatagccaagatactccttaagaagaagaagaaggtggaaggacttactcttctggttattcaaagttatgatgaaactacagcagtgaagactgtggcattggttcaaggatggataaataggccaatgaacaggaaacaggtcagagagagtcagggacacttgatccatgacaaaaagcacactgcaatggggaaacgatgtcctttcaataaacactactaggccaattgaataatatagagaaaaaggttgactccctacctcacaccaacctgtccatatacaaagatcaattccaggtagtttataaatctaagtgtggaaggaaaacaataaagcttctaaggaaaacattggagagttttcttatagccttagggtagaaaagacttctcaagtaagatatagaaagtagtgtcatagaagaagattgattaattgaactgcattaaaatgaaaagcttttgttcattaaaagacatcatgaagaagcaaagataaatcacagagtgggagaatgtatttgcaaagcaaattaccaataaacaacttattcctggaatatataaagaactcctgcaaatcaatacaaaatgacacacaactgtgccagctattaatttattgcctctcagctccaaattcacccaatttccccctagtttgcaatactggagctgggatctgtactcagttcctgctttgctcagtggctttatgtcaggctgtgtcaatagggatcactgatggaggctgcaagaatggaagagggacagggatgttttctctccctggattttgccattggtggtaagcagaacagtccaagggccgtgagttcctgcagcgcccctgtgacagtaggcatttctcatggttttgggatagcccagcaagctttgtctttattgcagaggcatgtgacaaagttctgcaacagctgcatcatctcaacaatctgaatctctgtttttagaggcctcttttctaagctgccaagtttcttccttggcttccttttctctcagccccaggagtggtcgctttctgcagctgctacccagatacaacttagagtcctcttttacctcttttggttattcgccatctcttgcctacttaagaaatatttgcaatactttttttctttgttcaaatttctgagtgtggaatcattctcctaactgaatcctggcatatacaacaacccaatagagaaacgggagagactcaaacaggtacatcataaagaggatgcccaaatggcaaagaaacatatgaaagagggctcaccttcattactcatctgagaaatgcaaatttaaggcaaacacaataccactatccacccattagaatggttaaaattagaaagactcacaataccaagtgttgatgagaatgtggaacagccaaaactcttacaatgctgataggtccatgaaatgatgaaactactttgaaaaagtgacattgtctatactctgtgtatactatgtggcatacacccaactgcaaaggatataaagatacactgaaaaacatgtacaagaatattcatggcagcattgtttataaaagccaaactctgaaattaaaataaaaacaactcagaggtccatcagaagtagaataggtaaaatatgatacaatgattaaatgcaatgttatacaaaaacagaaacaatctgtacctatgttgtataacatggatgaatttcacaaacatgatactgaccaacagaaataaggagctgggtgctgagaagtatatgacatatgattattctatataaatttttaaagggctaaactcatcttttgatagttatcattgctgggaaatcattacctctagatggagaaaggaggtagtgactgggagggtgtaagaagggaacctcatggcaggtaaaatttttttatttcttgacctgggatatgttcattttgtgaaacttgatgaactcactgttttaaaatcatgtacttttctgcatatatgttattcttcaattaaaaagtaaaaagaagacagaaaaagaaaaggcagcatgttaagacaaaatacttaactatattttattagtgaaagtttaggatccaatccacataaagagtttctgtttaaaaatgacaaacaaccttagagaaaaatggacaaagattataaaaaacaattcacataatacatactattatccaatataaaaggcagattcccttagtttctctcttcgaagcctgggaaataggtacttaaacaccaatggccttgactacccatttgaataggaaaacaaaaggctgacaaaatgttgggcggggggatgtgggaaaaggggcatcagtaccccttttctgactgtaccatcagtcagatataaattgttaaaattcttttggaggaaaatttggcaatatttatcaaaataaaaacaggactaacccctagtccaccatttcacttctagaaattctaaaataacattcacgcatgttcaaaaagatgtaagcaaaataatgttttgttttgtttttctttgagacacagttttgctctgtcgcccatgctagagtgcagcggcgcgatctctgctcacttcaagctctttttgatgccattctcctgtctcagcctcccaagtagctgagactacacccagcacccgccacggtgcccagctaattttttgtatttttgtttttttagtagagacggggtttcaccatgttagccagggtggtcttgatctcctgacgtcatgatccacccgcctcggcctcccaaagtgctgggattacaggcttgagccaccatgcccagccacaaaataatgtttatcgcagcatttttttcttgtaacataaaaaagaaatgggaaattaagtctctatgaatcagaagaaaatcaagtttcttcatacaatggaatactacatggctggtaaaaatataatggggtcctctgtgacttaacgtgacaaaatctagcgtaaggctaactcatgaaagcaactctcaaatcagtgcattaaacattatagcattcatgtaaaagaattaaatactcagagtatgtttgtaagggttgttttcaagtttgtctctatagcctcatagactacttaaatataccataccagaatatttttaagtcacagaagtaaagcgctaataagcaaaaataagcatttaaagtctcctccatgatgcctgctagatagtagaattcttattccctgatgtcctaatggcagactctggctgatgaaagtgatcaacacctaactatacaggcatttcaaacaacaggatttatttacggaggacaggaaggagggagcagaaattcttgttcagaaaataaattccttagaatttcattgagcttgtttattcttggcctactccatgatatggaatacttacttggaccatcttctatcggtttagggatggtgggatgctctctgtcctggacaaggctgatatggatccatagaaataaaatgtgagcctcctgtgtgactttaaatgttccaatagcgaaatcagaaaaaagtaaaatgaaaccagagaaattaattttaataatatatgttattaacccaaggtatgaaaacaattattatctcaacatttaattaatataaaagtattaatggaatatgatgtattcaattttttggtaagatcttcaaaatctggtgtgcatgtcacacttacagcccatcttgatttggatgctatgtttttcttgacttgatctgtatttaaatttcacaaacttcccagtagattcaaatacctaagttgttttgaacatatctaagcatatgagtttttcaagaacagaatcaagtatcagttttttaaaatttggatttagacagaatgaagtaaagttaaaaattcagtgcctccattgccctggccatatttcgagtacccagtagccacatgtggccagtggctccatattggacaaggcaagtggagaccagtcctcccatgtggtcttggaggtgggtcttggcattcttgggaactgctgccccagccagctgggctccctggccatgttagctcttctctgcatcctgaacacgtgggagctgcaggcactgggacaaccaggcaagggctggagctctgccagcttccagggcaggcagctggtcccacttgtctcagacacctggctgcctgacatttacccagcagcctcggctccaccatgcaaagctggcgaggacagaccagggttcctgcaggctgtgaagggctctgcagagggactgcattcctgggggatgagcctgaccttgggatgaacccagtgggatgacataagccatgatttcacaacatggcagtgatcacgagctctctgtgagctggggtggaccgcggtttctgctgagagcatggcggctacaggggaaactgaggcagcccacagctctgtcctgcaccaagatctctccttcaagacaggtcccagagcctcagcatcatcaatccctgggacacacatatcagtggcgagaacttgtatttcctctgaaaacggaagggctgcttttccacatcttgagaagtagctatttttctctttcttccttaaatcagtgatgaagcttctgttcaagtttcattctcgagaactgtgcagaagcttccctcgctttgcgctctgggctgggaagactacatggttccatcagtattctgtgttctcattttggtgaaattgaaatttcatggattaaatcacctctcctatgtacccagtacatgccatggagacaacccaataaaaggcatggtccctgtcctccaggatcccacagtttcatggaggaagtcaaaggagacttctttttattaaaaacagtggctcacaaccttgcctgcacagtagaatccctggaaagttttaaaaagcatcaatgcctaggatgcaccacagaggttctgatttaattggtctaggatgcagctttggcattgggattttattttgttttatttattttattttattgtttgagatggagttctgctctgtcacccagcctggagtgcaatggtgtgatctcagctcactgcaaccttcgcctcctaggttcaagcaattctcctgcctcaacttcctgagtagctgggattacaggtgcccaacactatgcccacctaattttggtatttttagtagagattgggttttaccatgttggccaggctggtggtgaactcctgacctcaggtgatccacccacctcccaaagtgctgggattacaggcgtgaaccactgcccctggccggcatggggatgttaaaagcttctcaggtaattctcctgtgcagtctgggtgcgagtgacagttttacatctcaagtccatgaccttagggacaatcaactgggtcccaggaactctaattgaatcccaggacttctgtgttcaatgtagcctccaaagttatcctttaggttggctgtggtggctcacacctgtaatcccagcactgtgagaggccaaggtgggtggatcgcttgaggtcaggtgttcgagactagcctggccaacatggcaaaaccctgtctgtactaaaaatataaaaattagccaggtgtggtggggggtgcctgtaatcccagctactcgggatgctgaggcaggagaatcgcatgaacccgggaggcagaagttgcagtgagccaagatcatgccactgcactccaacttgggcaacagaacaagactccctcttacaaaaacaaaacaaaacaaaaaaccacatgacaacaaagtgatccttcgaagtgtaaattaggccgtaaccttcttctcttcaaaattctctgttggctccccatgtccctttaagtaacagtcaaagcccttgtgtctcctgcaaagtccatatgacgggcttcccatgatgtctgggacccatcttccatgcccctctgcctgcttgctccctgggatccagccgcccgtgcctcctggccttcccttgaataccccaggctcagccttgacttggagcttttgcactgggtctttctcctgcttcctcctgtctggggaatggtcttcccccagaaatacacgtggccaactctctcctctccttcacaccattgctcacatattatcttctcagtgaggctttctctggtcctctcccagccctggtgcccctttacccagctctccattttccagcgtacttgtctccttccaacgtactatatgatgtactttctagcaatgtctgtttgttagcacctgtctctcctgctagagatgtgtctactttgtttgctgatgtattcctggtgcctaggatgtgcccgacatgaaatgtgttctgaaaatatttaataaatacatgaaaatctggagagtcctaattaagacagatttctcagtaaatgaagatgatgattttagatgtttaatgtcccacatccagattctaacgagaataacaacaggactatagtaagagtgataaccaacaccttccttggaaaatagggaagaggtgtgctacagaaaggtcagaaactgcaaggaattcctactaaaaatagcaggagcctaggcgtggtggctcatgcctgtaattccagctactggggagaatgaggcaagagcatctcttcagctcaggagttcgcggctgcagtgagctatgcttgtaccactgcattccagcctgggagacaggatgagactcccatctcaaaaaaaatacagtaagtaaatgacaggtcaaaaaatgaagaaaagacccaaaagaaatgcgcacctgcttgtctgagaaagcaggaggtgtcaggagactagaagagactatggcagatccatttacacttctgcattgtaagtattgagaatggagctgtgggcaggtcatgcgattgacgtgaactccttgttctttagctgttatgggtcaacactgtgggacgtagctgctcagagaggttcaagtgtgagtacagtagtgcctccttatattcgggggatacattccaaggcccccactgcatacctgaaactgtggatagtactgaaccctgtacatacatacctacgataaggcttaatttataatttagtcacatagttagggattaaaaacaataactaataataaaccaaaaaaaacaaaataagtaaaacaagggctgccgggctcagtggctcatgcctgtaatcccagcactttgagaggttgaggtgagtggatcacctgaggtcatgagttcgagaccagcctggccaacatggtgaaaacccatttctactaaaaatacaaaaaaattagccaggcttggtggtgggcacctgtaatcccagctactcagaaggctgaaacaggagaatcgcttgaacttgggaggtggaggttgcagtgagcccagatcgcaccactgcactctaggctgggtgacggagtgaaaccccatctcaaaaaattaaaaaataaaaaataaaaataaattttaaaaaataaggactacttgaatacaagctctggaataccaagacagtggatatactaacctataagtgactaatgggtgcacagtgtctacagcctggatataccggacaaaggaatgattcacgtcccagacaggactgagcatgatgacatgagattttatcagctactcagaactccacactatttaaaagttatgaattgtttatttccggaattgttcatttaatattttcagaccaaggttgaccctgggtaactgatactgtggaaagcaaaatcttagataagggggaacaactgtaataacagctgcaaatacgaaaccccaggcatggagggctcccagcacggacatgattcttcccaaggtagtggaccggacctcggggctgggaagcagtggtattccacattggacgtggaggcagatctaaagggaaaactccatatggaaagctaatcctcagtgtttggcttaagcaaacacagaaaaggaactgtagcaaattgaaattttcctgctatgatcatctcccaggatgctttctgctcctctccagtcgctgtagaactaaactggtttgtaaacttctgtcaacccatctttcagtttcagatctgaatgtatccaggtggacagggagggatgagggggagaatcagctcacactgtttggggcatttacctagtttggtagacttcttcttgttttagcttgaataatgtgaccaaaaaaaggtacctatgaaaagactctgcattatttaagcaaaagaatatggcagttataacatacttaaaatatactgcattatttaccatgtgctttcagttaaattcagaaaaaaataaactctgtaaaatgaaggaaaagatgtgaaaatgagcaaacagactgaaatgaaatggaggttcctgaattactaaaatcctgtaaataaatagatagaaccacagtgcaggtgaaaatgacattataggcattaaatggcaaaagtgataccagaaaaaaaaaaaaaacaaatgaaggatacagaaggaaaacacgataagctccaacagggcagaattttcttttttagctatgaagatagacgttctgagagtcaggatgagagagacatggaggagataagcgaaatattgaaatattcatttaaatacgaaatattcaaatatccaaatatccagatttaaaatataggaagaaatagtgaacaaaaaaatatataccattgatattcccccaaaaaagagacaagaaaaataaaactgaatacattatcaaggatataatagtataaatgtattttggatttaacaaagacattaatctgaagattcatatggctttacatttacaataccattgatgaggttcatgaaaagtgattagtttttgcacataaattttgtaaaatatttttatttcaaaggaaaagaaaaactccataaaggacagaaaagccaactaaaacagaagaaagatcaggctgttttcttacttgtgctctgcagtgttaggagtgaaagtatgatgaaactggcaaatttgatgtccagagaaaaaacttttgctacagaaaactttaaaatgtggcacacagtccaaggcacaaaagcaggacaggagacaaaacctaggtgtgcactagctgggtggtctgatcagaagcagctatacatagaaccctagaagtgaacgagggaagaaacacactccacagaggaaataaaatatccttgtggcttgtcttaggctctagttggaataaaaagaagaaaggttttactaagaatttctaatataaatcattgcatgagtttgggactgaaatttatactacctgtgtggactgaaaatctccatgaaattttattttaaagtgatttcaaattggcaatcctcacatgtctaggagaactaaactaaatcttctttggaagaccactttaacttcagatttcaaaaaactccaatagataaaaattcctgataatatgtatccataatcagaaattacaaatcacatgaggcaacatgcctgccatagcaaaactcagcaaaaaaaaaaaaactacagaattatcacaaaacctatagctaccacaatgataaaattcagaatattttaaagtatgtttattataattaaataaagagtttccaaagtgtgattatggaactagaaactatgaaaaatgaccaggaaacttttgaaaaagaatgataaaatccctaggacttaaaaaaaactcaaggcccaggataaacagacatagaaaatagagtaggaaagtctaacatgtcttttcagagttctagaataaacacattgagagaattggggaaaaggtaatatttgaagataaagtggctgcaaatttctgaaattgattaaaaaatactaattgtcagattcagaaagcacaacttctcccaaactgaataaatctacagctgcaaaaccctcagggcaaaaagtggacagaaaatgaagaggaatgatgcatattaatgataatttctctggaaatggaaatatgaacagcaatgctagaagctagaaaataaaacaataccttcaaaattttgaaaaaatattactctaaacctggagttgccaggtgtaaaattatatcttgcaagaatgaagttgaaatacatatatatcaacaagaaaaaattgtagagtttaaaaagaataggctcttaaaaaggaaacttctaaagtccattgtttgtaattcagaaaaaaaaaatctgaggtgtaggaaagaatggtgagcaaagaaaattatacacatgtgggtagaactaattaaataatacaatgtaaaacaaatattatgatttataaagtgtacagtacaaactgagtaaaaataaaatattgggcaaaaacagcatatatcagtgtcaggtgttaaatattctaagctgattctattaatctgaaagagggaaaatctattaatgaactagaaaactgaaaaacagaagattagaccaatcacctacatttaaaataccgaaaaagatagaaaaacagtgaaaaacaacaaaaacccccaaaattaaatgatagaaatattatcaattataataatctgcacaataaatgtaaatgaattatactttctaggtgaagaacaaaggtttttagactccaatttaagaaaaatattctgtttacaagaggaacacctaaaatattcagtcacaaaagtttgaaagtaaaaaaatgaagacaggtatacagaataaaaaccaacgagccaaaaggaagctagtgtagcaatatcaacgctatacaaacttagtaattcaaaatgaactactgaatataaagtatatcacaccgtattgtgccccaaacttctatgaatttaatgcatagctttacaatatgcaaatgaaacaatgaatattactgaagcagaacaaataaatccatcatcttgcagaagattttagcacatctttttcagtaaattatagaacaggtagaagacaaatgattgaatatatagaaaatttaatccataaactaacaaacttaattaataggtaatataaaataacattcttaaattcagaaaaattctttccaaggatacgtggaatatttattaaaatgaaacacatgcagtaagacaaaaatttcaaagaactgatttcatactgaacacaacatggttaatttggaaattaaaatgagttttagaatctcagacatggaaatttaaaaatgtatctccaggtagcttattatatctattaattagaaattagtaattaataatgttaaaaatactttggtttatacacacacacatatgtatttataataactcttggaaagccaagaaagttgcatctaaaaaatttataccatttacattggaaaagaggcaaatgttaaaatagaatagaaattaataaaataaaaagtattatgctagagaaactgagcaaagctaatatttggttgttttaaaagaataataaaatagaccaactctggcaagatatattatgaaaacatcatagaaagaaagcacaaatacaattattttgagaatgaaaaaagcaaaaaggttaaactgtgatttaaagaaagtagtttattttttcaactttatgacaatatatgcaacatttaattgaaatggacaaattcttaaaaaaaaaaatcaactaatctgaccaaaggagaaatctttaatttctagagtcctatagccattgaataccatgcatcagtagttaaaaaaataaattaattaaaaaaaaactttccactatgaaacactaggcacagatgattttatagatacattataccaatgaagaaataatcctaaaccttcacaaacactttaaagcaaaacaaaacaaaacaaaaaaacaagagggtacaattcccaaattatgttatatggctaccacaacacagatatatcatagctagactaggacaatgtatgaaaaaagttacaggctaatcttactcattagtatggagcagaaacctatatcccttcagctaatgacttgtgaaaagataacatgcaatgaccaagtttgttttatttcaggaaggcaaagtaaatacaaaaattgtgaaacttataaaagttgttcatcatattacattgagaagatcatgttaaactcttttattctgattactgttttctaattctaattttaattttcttaatgtttgtttcttatattttgcaggtacgtttttatgtgcattcacatttagaatggaggagtacattcacttggatttatccctttttcattatgaaatatatctctttgtttttagcaatgtttgttctaaagtctactctatctgatattgctatgactgcactagcttttcttggttagggtttgcatggtatgtcttttctcatcctttcatttttaacaactctgtgttcttacgccccaacttgtgagtcttaaacaggatatagcttggttttgtctttatactcaggctgccaatctttgcttcttggagcatttactcatttatatgtaatgtaattactgttatattgtgtttattgtcctccatttttttttctgtttctacttgacccacttgtttcatattctttggcctctcctgtcttgacttcttttaaatcaatcagacttttcattattctcattctttcctttattaatttattgttatttgttattttattattcttttagtttttaccctaaagattacatcatttattgatgtgttaatgtctaaaataagttattgcctttccacttctctgattatgctcaaaatctgagacattctaagtccacttaaatgggtatattccattatacccatctaatgagttctaatcttaatgtattttaagtttttctaatttccattcatttcttcttttgattatatatatatatttgcttcttcttttgcagtcttgctgtcatatattttaattttccatgtttcaaacctcatattattaataccattatcttttttttttttttttttttttgagatggagtctcgccctgtctcctaggctggagtgcagtggtgtgatctcagctcactgcaagctccgcctcctgggttcatgcgattctcccacctcagcctcccgagtagctgggactacaggcgcccgccaccatgcctagctaattttttgtatttttagtagagacggggtttcaccatttacaggatggtctcggtctcctgacctcatgatccgcctgcctccattatctttttatacagttgatttcagtccatgtacatatatagtcactgctttgctttcttttccttctttcaattctgtgattccctgcagaattttttttgtattagactcaactatatgaacttgctattattcatcagttttcatcaacacaagcatcactatcatatagttcaacctaatattaccttaacgcatttgtctgaataacctgtgtaacttttataagatggagtcttgctttgttgctcagatggagtgcagtgattattcacaggtgctatggtagtgctacagctgcaaactgctggattaaaaagattctccttcctcagctttctgagtaactgggactgcaaggcatccactactgcacctggctgtgagactcgtgtctgttttttattttgtctcttggtcatgtggccctgaattttggtgtgtgtactactttctttaaatacattgttaagtacacaaagcacacaaatgttaatgcgtaccttgatgcctttttagatatgtgtatccctgtgtaatttccatctagatcaagggatacagcatttttagcagttcaataggttccctcatgccctctgccaattattatctctccaagaatagttgggggagttatacttgttttcaatttcatgtgaatgaaatcgtggagttgatgtttcttcccttaactttatgtccatgagttcatcaatgctgtgtctatcaggattttgtttcttttcgttgttgagtagcattccattgcaaaaattgaattttttatacagttgaaatttatttatacaattaaaaatttttaaacagttgaaatttttttcaaatatatttatccgttctactatttatggacacatttttcatcatggtggttttataaagaatgtagctataaacattctggtgcatgtcttttggtggacatgaacacccactttgggagaagatttatatactggtaattacagttattagatgataatatgtatgtatattttgatttagtaggtattcctaaatagttttacagaatgattgtgccaatttatattcttattagcaatttaagagaatttcagctgttctccatcctcccaaacacctggtaatgtgagtcttttaaatttagtctttcttgtaagtatatagcagtgtctcatgagctttatttgtatttctctgatgcttgaacactttttcatatgtttattggcgatttcaaaatcctctgttgtgctggacaacaaggtgaaacctcgtttctactaaaaatacaaaaaattagccgagtgtggtggcacatgtctgcagtcccagctgcccgaagggctgaggtgggaggatcacatgagcctgggagttctaggctgcagtgagctgtgatcttgccactgcactctagcctggaccacatagtgagtgagaccttatctaaaaaaaaatccaatcctatattgtgaagtgcctgttcatatttctttcttatttttgttagggtcatcaaaatttttctaatttatttgtagaaacattttttttaatactctgaatttgagtttacagttgaaggtttgtactggaaatatctctttcatgtttatggcttatctgtttattctcttaaaggtgtcttttaatgaaaagggattcttaattttgattaaatcattatagaaatcttttatagttggtatatttttaatcttgataaacaaatgtttgccttattcaaagataattaaagatcttttcctactatgtgtctcctagaaaactaatttatttttattatcatatttagttcattggttcatcttgaattaatttttttgtatagtatgaaatgggggttgtattagccaggaatctccagataaaccctaccaataggatagacagatacatacatacacacatagtaaagtttattgtaaggaattggctcatgccattatagagactgagaagttccaaaatttgtagtcagcaagtagagatccaagagcactgatggtgtagttccaataaggagccagcaggcttgagacttgaggataaccagtgtttcagtttgagtctaaaggctggaaaaaaccaacattccagcctaagtctgtcaggcagaagaaatttcctctaactcaagggagggtcagcctttcgttctatctatctaggcttttaattgactggaggagagacaccgacattaggaagtgtaatcggtttccctcattctaccaattcaaatgttagcctcaaccaaaaactccatcacagacaccccgagaacaatgtttgaccaattatctgggcaccccatggcccaatccagttgatacacaaagttaaccatcataaaggtcaaggttggcttttatctttgtgtgtgcgtgtgtgtgtgtgtatgtgtgtgtgtatacgtatacattgttgtttttcatcatggtgaatatggcacaaagctatttggtatatcagataaatacaaaagaaagctcagtaagacacttctctatacctatatgtatacacatacacacacatatgtgtgtatatccatatatatgtatgtgtgtatatgtgtgtatacgcacacacgtatatatttgacctatcaccatttcaaaaaatgaccatcctatttccactgaatgttgtgtgtatcctttgtcattaatgatatgtctgtataaggtggttgttaacacaatcaataatgttgactgaaaatatagctatatacatatgtttgtattttaaaatattttctatttttactaaagtaataaatgtgtatagtttaaaaattatgccgtattaaataattctgcttcactcctttattctctcctacttctacttcctataagtgatggcttttcatattttttctattctaattaatacttatgttgctacttcttgatttatgaatgtttcatattatatactgatttcttgttttattagctacattttttgtttttacatatctacccccatttcccttcctctatctaatcaatatatctatattaccatttgtgagtaaatcattaattaatgtttatattaatatgaccatattgttttctgactagacaagcagtgtacagtaattgttttgtacaactttttgcttttttggcactgacaattgctttgttttataatttaattagtgttctatgtatggggagccatttctccctaagcgctccaaagacctgtcaaatacctgtcagtaattttccaagtgttcagacacattttcaagcacctatatgcatcccacccgagagacttccctcatataaaccttagtgaacttggtctcccagcttacagtgttacagcagagaagcagagtttttatctcatttcctattcctttgtatatagccagtttgcatttttgattgtttttcctcttggaatctcttaggatctactttttatccctggtgttctgaaattgtgtgatgctgcgtgtggctggcataggtcttttcaatttaatttaattaactttttgcacatttccccgtacgcttcatgggctcaatctggccattactcagcaattactcggcactatttatttgatgatattcttcccacagttttctcccactggtcaggtgtgggagctcctggatagatctaacaggcttttccctttctctctccttacattcatctctttatcactttagttctactatctattttaatctcttccatctattgtctgttcctccaagttcttttctatttgcttatttgctttattttaaaaattttatttaattaatttttttaagagacagggtctcactctgttgcacaggctggagtgcagtggtacgatcatgccttattgcagtctccaactccgaggctcaattgatcctcccgcttcagcctcctgtgcagttgggactgcagcacatgccactacacccgactaattttattttttattattctgtagagatggagtcttgctatgttgccctggctggtctcaaacttctggtctcaagctatcctccttcctggggctcccaaagtgctgggattacaggtgtgagccactatgcgtggccggctttaattcttgtgcccctttttgtcttggtctatgcctttcatgtcgagtcttttctctcaggtattgggactttgggctgctcactcatacttaggagcaagactttaagctcattggaagctctgggtatctgcaccagctatccgcagtggacctccaccacgatgcagttagacggccagcttttttgtctctctggtacacataccctctaaagacaggccttataagcctctttattggtgaccacttggtttctcttgaaaataatcctgcaatctccccacctagtggtaggggttatgccaaatggctgactcctgggaacagggcaaggaagagaggtggggtgtgagcattctggatgtaaacttatttattccttttgtggtttccccacatctgcagcctctcaattccaaagataataaaactcctatttcctgcagagataggaatggatatttccatggccacacatggaagacaaggagattggaaaagacatgggggtggcacctaactgctcagtacagatgtgcaaccttggaaactggtgcccccaagtccaaaacctccccagagtcccatggggaaaattaatttgtttttaactgtgactacctctgtaggcacaaatatttctgttttcttagcccttctgactcatttacccccattctgttttctatctttgaaatctaacttacatctatgaacactgttgattcatcctctattatctttatctttatgggctattattacttcagttactttactattgcaccaatagagttttgggagagtaaaacaattcttatttatatctaaatctctttacacacatgcaaacacacacataattattcccaaaataagcagagaatgctagttaaaaataaaacttctactttcacaaagattaacacaaagaaaatctcaaccaactataaaatgtaaaaatacaagcccatattctgtgattaaaatacaataaaatgcatagcaaaataataatcctatccacttgtcaataacagcaactgttactagccccactattattattattaatattattattactactagtagtaaataactcctggaataaagaggaattcaaaataacttataaactctttaaaaatgaacagtaatgaaaacatcacatgtaaagatctgtgaatactcacatgaatatgtatagtctaacacacatatcagaaaataaggaagataaaagaataaacctaaaaaataaaaaaaaaaagccataaacctaaaactcaagaaactagaaaactggtgaaaaaataaactgaaattctatgtgactatttcataaagataatgggaacaattactaaaatagaagtttaaacaaataaaccaaaactcagaaaggttgcttaataagattaataaaaataaaatttttcacaagcctaatcaagaagaataaagaaggaaaaagtaaacaacattagaaaaaatggggtagatgcataaagattaagaacattatgaaaagttatgtgtaatctacacacggctttatggtaacaaaggtgaacatttaaaccagtttttttaaagataataaaagtggaaaaaaatcaactaaagataggatcgactacctaaatatactaacaaccatagaataaaatgaaagggactcacatagcaatccctaaaaatgttaacaggatcagatggctttatgggtaagttctaccaaattctttttttttttttttttttttttttttttgtgacagagttttgctctgtcgcccaggctggagtgcagtggcccaatctcggttcgctgcaagctccgcctcccaggttcacacgattctcctgcctcagcctcccgagttgctgggactacaggcgtctgccaccacacccggctatttttttgtatttttagtagagacggggtttcaccatgttagccaggatggtctctatctcctgacctcgtgatccgcccacctcagcctgccaaagtgctgggattacaggcgtgagccacagcgcccggcctattctaccaaattcttattgaataaaaatgatactatatatcctatcaactgtttcagaccagaagaataaaaatggaaagctcctcaactaattctagaatcccagttcaacttcacacctaaaccaaataaagagctttctacaacagacaacaaatcaaggaaaaggaaagaaaaaaaaaactagccatgcttacatttgaacatatactcaaagatactcaaagaaacaatgcagatattattgtaacaataatataaacaatagcaagctttgacccactatggttaactcaggaagatagaatggattcaacattagcgaatctatcttataattaactaacttaaaagattgaacagaaaaaaatgtgataatcacaaaagatgatagattttaatatccattcttattaaaattattagcaagctagttataacgaggaagatacttgttaaagaattaagaattacagcaaatattttaaaatagtaaaatattagaagtctttctgtttaagtcagaaaaaagaatgctaacactccctgcaacttttcgcattcttctcaaggttttagccagacaacaaaaagtaagagatgtaaaactgaaaaagaaaagaaagattgcctctaaatagttgacttaatacatgagtgtggtatgagattaaagtaaaaagttcaccatactaataactttcctcagctccagccatcgccaagtagaagataattaaaaaaagatgctaatctgaaaagaacccaaataataattaactaaattcctaggaaaaatacctttcttttcaaagttttcttaggtgatcttatttgagtgtcaggctaatgtactgaactatttatttgggtatgtgtgtgttagtttgtgtgtgtgtattcgtatgtgtgtattggtttgtgtgtatttgcactggtttgcgtgtgtgtgtgttggtttgtgtgtatgtgtgtaacggtttgtgcgtatgtgtgtagtggtttgtgtgtgtgtattggtttgtgtgtattggtttttgtgtatattggtttatgtgtatatattggtttgtgtgtgtattggtttgtgtttgcattggtttgtgtgtgttgtgtgtatgtgtgtagtggtttgtgtgtgtgtattggtttgtgtttgcactggtttgtgtgtgttgtgtgtatgtgtgtagtggtttgtgtgtgtgtattggtttgtgtgtatgtgtgtagtggtttgtgtgtatgtgtgtattggtttgtgtgtgtgtattggtttgtgtgtgtattggtttgtgtttgtattggtttttgtgtgtgtatgtgtgtagtggtttgtgtgtgcatattggtttgtgcatatgtgtgtagtggtttgtgtttgtgtattggtttgtgtatgtgtgtattggtttgtgtgtatgtgtagtggtgtgtgtgtatgtgtatttgtatgtgtatgtgtgtattggtttgtatatgtgtgtatttctatgtgtatgtgtgtattggtttgtatatgtgtgtatttgtgtgtgtgtattggtttgtgtatgtgtattggtttgtatatgtgtgtatttctatgtgcatgtgtgtgttggtttgtgtatgtgtgtattggtttgtgtgtatgtgtagtggtgtgtgtgtatgtgtatttgtatgtgtgtattggttggtatatgtgtgttggtttgtgtatgtgtgtattggtatgtatatgtgtgtatttgtgtgtgtgtattggtttgtgtatgtgtattggtttgtatatgtgtgtatttctatgtgtatgtgtgtactggtttgtgtatgtgtgttggtttgcgcgtgtgtgtatttctcttttactcttcctctgccatcccatgaaagtgggccttttcctgtactaactcaagacaggtactgcgcccagggctgaaaagggagctgtctgcgttcttccctgctttttcaggagctcacggaagaggccatgctacccaccaggggcaaacaccaaagaagagaaaggggtctttgaagatgacaggaaggtaagaggacatgccttctgttgttctgaggaggaggtcagagtccaaagacagcaaggacacaacagggcttcacctgtgggttgtggggaggcctccggatgatggctcgtgcctcacctatgaaggcagggccctggggtgctgatttccagcctccacaaaggctgggcatggacgtgagagtgacctaacttaaagggacattccgggtttgggaaggagcatagctggggcgacttggatagccttaagggtcagaggcccctcatctcttttcgctgttggacgctaaagaaggcaggatggctggtggtaaagaatcgaatctgaagtcagccatgtgctgagggcaacaagatatggagcggaagcccatgcccttgtggacaacacgaggccgccatgacaccaatcagggccaacgctgggaagagaatcaacgtccactttgttttaggtgtcattttttctttcccgtttcaggtagtccattccaaccctaaatgatgaactctgtgaggctcagtttcctcttctgtaaactgcagacaatcctcatagcatccctgtgaaaatggaaaagctaagatgtccagtgtgcttggcacagttgctaacatgtcataaacaccccaaacgtgtcaggtattattattgttactgttgttgtcttgaataacatcgaatcaaaatatatgctgaaatcctatgagaaatataaagataaatagaaagaagcatagcactggtggtagatgataattgcatttttctgatttgataccatattttattcttagctcacttaatatatcaaagtcagaggagcctattgataaaattgatttaatagtaatatatcaaaccttgcagagataatgcttgtttttttctagtgcccatggaatatttacagtaataattacattcaccctctaaaagatctgaataaattctttaaaatgtaatgcctgtattgtctaattgccatacaaactatatataaataatagaatttaaatgagaaacttcttgaaatttaataaacccttctatgtatctcagtaaaaggtggcacacaactataaatatagactatttgtaaaataatgagacaacataagacaatgtatgagctgcagccaaagctgtacttattattacaataataatcttaaatatttttcatattgagcaagacaaaaataaatacactgaccattacattcaacaaatcagcaacaaaatggggaagcataagaaaagtgggaggaaggaattaacagaaataacaagaataaatatgcattcagcagaattgctataaatgagattggtttctctgaaatgacaaataaaatattcaaacccaagaaatctaatcaagaaaaaatgagaccaaaataggattgagaataaatatataatcacaaatacaaagaggatttatagacttttcagagatttctgtgaacaactctgctaaaaatggaaattgcataaaattgatcacattctgggaaaaatgcatttaaagcggcttatgaaaatctagaaaatacaaataaaccagagactcttaaaaaaataaaggattgtaaaagaactatgtgtttgtttctatgtgtatgtgtgtatcagttctataaggatgctgggaccagagggttttacaggcaaggtctatcaatcctctaaggaaaaggtaaattcactgtattttaactattatagagaactgaaaagttggaaaggttactctctctgtctctctctgtcacacacacacacagaaatttaaaatgaagagaatatattctgaaaaagaggaaatactgtattttggataacatataacttacctggaaaattcaacaaaatcaacagaaaaactgcttgaattaattagagagctaaggagagtggaatattaaataatgtaatataaaaataatcactattagagataaccagttgatacatttaatttagaaaattcctatttattacaacatccctaaacagagattgttcagaaataaattcaacaagaaatgtgcaggacctatatgtggaaaacaatcctacaaaattttacccagggctgcacaggtcaacactccaggacggacagggtggcaagtcctaggctcaaggacagagatgctgatatcggagcactgggttgtgatttgaagattcacgtgttgaatacaggtctttttcatgactgggtatctactcaaaggaaaagaaattgttctactattaataaaaagacactggcatgcacatgtttattgcaacactaatcacaatagcaaggacatgaaatcaacctatgtgtccattatgggtggattggataaaagaaagtgtggtacatatacatcatggaatactacacaaccataaagacaaatcaaataatgtcttttacagcaatttgtgtggagctggaggcaatgattctaggtgaagtaactcaggaatggaaaaccgaataccacatgttctcacttacaagtgggagctaaatattttgtccaaatggacataaagatgggaacaatagacactgaggaccccaaaaagggagcaggaagggaggagggaggggagcaagggcggaaaaactattgagtcccacgctcactacctgggcaatgggatcaatagaagcccaaatctcagaatcaggcaatacacccatgtacctaccacacatgcacatgtaccccctgaatctaaaatttataaaaagcaagaaaaaataaatataaatacaacctagacactattaaaaaaaaaaaaacaaaagaaagaaacatgtctttttttttttttttttttttttttttttttgttgagacagagtttcactcttgttgcccaggctggagtgcagtggcacgatctcggctcaccacaacctccgcctcccaggttcaaacgattctcctgtctcagcctcctgagtagctaggattacaggcatgctccaccaagcctggctaatttcatatttttagtagagacgaggttactccatgttggtcaggctggtctcgaacttccaacctcaggtgatccgcccaccttggcttcccaaagtgccgagattacaggcatgagccaccatgccctgccgaaaacatgtctttttcaagtctttgggagacttttaataaagagattagtgagaaatttccagaagcctggagagatgtaaatgaagtgaagctgatgaggaacgaccctgtgttgggaagaaaggtcctccctggtttagattagataccccacccccctccactgaggacctgagtaagcagggtcctgccttgatgggggcacacgtggtgaagctaggagagaaagcaagttctcttcctatgggggtatctgcacgtgcacacctcctttttccatgatcgccagcctgagaaggaccctgtctccaaccttcccactgtttacttccaacatggggagcttccttgacctcccagaagcaccatccgaggtctcagactctggaattaacttgcagctcaagagagcttactgactgcatgttgtacgtggggacctgcttcacagagggcgatgttgtcctgggcctctgtcccagaacctccagcttgacccttaggcttaaagttgttgttgtttttgttttctttcaatagcttttggggtacaagtggtttttggtcacatggatgccttctatactgatgaattctgaattttagtgcacccatcacctgaacagtgtatgttgtacccaatatgtagtcttttattactcaagcccctccaacttccccaactcccaagttcccaaagtccattatatcactgtatgactttgagtcctcatagcttagcttccacttgtaagtgaaaacatgtggtatttggttttccattcatgagttacttcatttagaataatggccttcagctccatccaagttgctgcaaaatacattattttattcctttttatagttgagtagtattccatggtgtatatctaccacattttctttatccactcattggttatcttagatctcagacctgaaactgtaaaaattctaaagataatgttggaaaaactcttctggacatccaggcaaaaaaattcgtaactaagaccccaaaagcaaatgcaacaaaaacaaaaataaataaatgggacctaatgaaactaaaaaacttctgcacagcagaagaaataataggcagagtaaacagacaaatcaggctgaaagataaaggagaaggcaggtggctttttcatttgccaagggtctcagaagacagtcggcccagttgattgacagtcagtccagttgattgacctcccactgtccacattaactgatttcctaggtaatttctaaatactcacctcacttttctacagactgggtttgctgggatcataccagggtggactaggaaagtttgagtcttcactctcatcagtttccttcctgaccccacccccaagccactttaaataaagataagatctaagtagaaaatcatgcactcgctatgaacacccagcttcaagagaagtgccctaaatgcctccggtagagaaaacctcagtgcgtcgtatgcttgtttccatatgcaaatgaaggcttcaccaacttccacccctctttgctgcctggcatatcgtgattggcagggctgtacttcctaccctccatatgcaaatacacctcatattcactaacgcacagttttaaccccaccccacaggtgggaggtcgcaaaagcaaaggatttttttttctagttcttgtcaatcaaccagccaagctagtttatttaattttatacactagctcaaagtcacagccagtgtctgaaaggcctgaggggtttctcagaggtatcctaatttcgtgcaaccagctcctgactttcatctgcaccaaggtgggcagtcaagatgaatgagtgaatagaaatatgacacaggaaggccctgaatagactcagtggtcaggagacattaatcttgacgtgtgtgatctactttcgcagaggagctgaagtcaccctttctgcccaccacacctcatttatttggttaatctcccataacttgggccttatgattaaccctgtaagtaagctctgctctggtgggtctttgcccctctgagtttccaaaatggcatagattattgaaatctctcctctgacccattcatagacatcagccttcacgccatctggggctgcccctctcctttgtgactttgaccttaaacagcccagtcctataaataccaccactgaggtcaatgccaggtgcaaagagcatgctttggtgtgcaatccctcagcacctagttggtgccaggccctgagggatgtgctgttgggagtgtagagatgatttatgctcagagaaaggagaccttcactctttaacctggcgaggcgtgttctgcaattgaggaatattcctcagaaggacggcaggtggaagcttgctgctggcttgtggaggcggaggtgattgagcagcctcgcttagcagacaggcatttgtcaggcgggaaaaacaagggtagagtggaatcacaagtccgatgtgatgacaactttagtgtgagggaaagagcatccagaaaggctgttttgagatgttaacctgggtcattcctctctcctaactgaataaggcacaaaaacagtagctgctgcatttaccattgtgcagaaatttcagatgcaacatcttatcattggttccatgattcttgatgccctcaaccacactgaggattttaaaaaaggttaagagaatggagacagggagagaatctgttagatggatttctctggaaaaagttggatatgggtcctacatccctccccacaacctcacctcaagacagaaaggaagtgcttcaaaagggttgcttggggaagttggtgtgtgccctgcagccaggaggacacgggtgcttgtggctgcctccacttgggagacccggaggtggctgatttgtcagcagaacaagagagagacagttttagcagccttgggacagcctgctccccagagttcacaggaatgcctcccactggctgtgcaggaatcaatgccttcttgcagggcacagccactcccacagagagactccctggggatgggccaccgggaactcagggactgaggccatggtgaagggcattacctacttcccggacaaatttttcaaagtgcaacccacaaaagcagccctcaagagcctgtgtcactttaaacaatctgccagtcaagtgagaatctcactaaactctccagtctccctctcccgtgctccaactgcccaggaccaagaaacattcgcttggaagtgggaaaagaggggagcatgaaggcaggcttccctggcttccccggcagcccatctgccagggagaggtcccagctgtgcaggtggtgctggtgaatgggagaagtcaaatttgtagagaaagttggaaactgactactacgtaagactggcttttaaaaccactcagttggcacttccatgagttcagactattgtaagaattttctattctcgagtgacttggaaagtcatggaggctcgtctaagtttgcactcaggagataaagaagaaataacccagcaagcaggcttacaggacagaaggaaggaagtattgcataccatgcctctgtttgtttcacacactggggacagcacttaggctttgaatgagtgggtctcaaaggccaggggttgcgggggtatgcacactttccatgggtgcctgtattagttcgtcttcacactgctgatgaagacatatccaagcctggataatttataaagaaaaagaggtctagtggacttacagttacacattgctggggaggcctcacaatcctggcagaaggcaaaaagcacatcttacatggtggcagacaagagggagtatgagagccaagtgaaaagggaaactcattataaaaccatcagatctcgtgagacttattcactacaatgagaacagtatgggggaacccgcccccatcattcaattatttcccactgggtctctcccacaacacgtgggaatcatgggagctacaattcaagatgagatttggggggagacacagccaaaccatatcagtgccccaaacttaatgattacaaaacctagaacactccaaggtgctaaagacacagttcatattactgtagaaagtgagataagtaaacttcacttccaaaccccctcctccagcattttactgcaagcaatggtagaaacatatagaaatggagaagtcatttttcaacattgttatgtagttttctaaattctaatgactgcataatagtctacttaaccaatctctgatggatggacattaggttacttccaatttttcaccattagaaacaacgctatgatgaatattcttatgcataaatctttgtggtttcctctgattatatcctgtggtgaaaacagaaaaagtggtactactgaactaaaggagggaaaaattgtaaggcttttgaacataacgctggtgtcccccaaaccttctaccaatttatattttcatactttcaccttagttctaagtttctactcaatggacaagaaatattttaaagtcttttctaatctgataaaagcttactggtaggtttttaatttgtattcctttgaaatctagtgagaataaattttcagccaggcacggtggctcacgcctataaatccaacactttgggaggctgaggcaggtggatcacttggggtcaggagttcgagaccaacctggccaacatggtgaaaccctatctctactaaaaacacaaacattagccaggcatggtggcatgcacctgcaatcccagctactcaggaggctgagtaaggagaatagcttaaacccgggaggcagaggctgccatgagccaagatcacgccactgcactgtagcctgagtgacagagcaagactccatctcaaaaaaaaaaaaaaaaaattctaggttaaccaaatgtatttcctcttttacaactttcctttgtagtttccttgttttattttatttcaattgaaaatgactgtatataattatgggatacaatgtgatattttgttacatgtatacactgtagaaagatcaaatcagcctaagtaacatatacatcacctgaaatatttatgaattttttctgtggtgagaaaatttaaaattttctattttagttatttacaagacattgttattaactatagtcagcttgctgtgcaatttatcaccagaacttattctttctacctaggtgaaactttagaacctttgaccaacatcttccctttccctacctgcctcacccccattccctggcaactaccattctactctctacttctacaagtttgaccttttcatttatttatttttatttttatttatttattttgagataggatctcactctgtcacccaggctggagtgcagtggtgtgatcttggctcactgcaacctccacctcccaggttcaagcgattactcctgcctcggcctcctgagtagagttacagacatgtgctaccatgcctggctaatttttgtatttttagtagagatggggtttcaccatgttgggccaggttggtctcgaactcctgacctcaagtgacccacacgcctcggcctcccaaagtgctgggattatagtcctgagccattgtacccggccaagtttgactttcttagattccacatataaatgagatcatgctgtatttgtctccctgtgcctggtttatatcacttagtgtaaagtcctctaggtttgtctatgtgtcgtttacaacttttcatgtattatctttcatttgtatatatttttgtgttctttatctttttcatatctgtttatatgttctttacataataaaggcattgactgcttgtcttatttgatgtaaatttcaactacagttagctgtttaccttttagtagtgatttttgatacttgggtcttttaaatagtatgtagcaaaatctataaatctttttctataagatttattctactaaggttttgtaacaacagagaaaaatgtctatgttataattttaggttaaaagacaaggtacaaatttatatttacagtatgattagagctatatcacacacacacacacacgtgcacacacacgcaccccaaattaaaaccaaagtcctaatagcaaaatcaagaagtctgtcaaaattcaacaatggcttaagttgatagttggccatgtagatattttttctttttatttctattttctacataacttctgtcttgtatatggagacacaaatattagaagtgaatcttattccacaaacccaagtgtgcaagaaatgtcaaaatgtttttattaaatcaagataaatctgacttgaattaccatctagcagggctgtcagcagattttagcccacctattttgtctcttctgtcccttttttaaaaaattaattttttaaaataaattttttaatttccataggttattggggaacaggtggtgtttggttacattagttaagttgtttagtggtgatttgtgagattttggtgcgcccatctccagagcagtatacactgcccccaatttgtagtcttttatcccaccccattcccaccctttccccgtgagtccccaaagtccactgtgtcattcttatgcctttgcatcctcatagcttagctcccacttatgagttagaacatacaatgtttggttttccattcctgagttacttcactagagtaatagtctccagtctcatccaggtcactgtgaatgcaattaattcattcctttttatggctgagtagtattccattgtgtgtgtgtgtgtgtttgtatatatatatatatgttcttatatatatattcttatatatatacatatacaaattcatagatatatatatggatatatacatatatgtatatgtacaatatatatgaatatatactatatattgtatatatattcaatacaatagatatacaatacaatagatatacaatacaatagatatacaatacaatatacaacatacaatgaatatatatacaataaaaatatatatgtgtatatacatacactatatatatacgtgtatatattccatcatatatatacatgtatatatatattccatcatatatatacatgtatatatatattccatcatatatatatacatgtatatatatattccatcatatatatatacatgtatatatatattccatcatatatatatacatgtatatatatattccatcatatatatatacatgtatatatatattccatcatatatatatacatgtatatatatattccatcatatatatatacatgtatatatatattccatcatatatatatacatgtatatatatattccatcatatatatatacatgtatatatatattccatcatatatatatacatgtatatatatattccatcatatatatatacatgtttgtatatatatattccatcatatatatatacatgtttgtatatatatattccatcatatatatatacatgtatatatattccatcatatatatatacatgtatatatattccatcatatatatatacaggtatatatattccatcatatatatatacatgtttgtatatatatatattccatcatatatatatacatgtttgtatatatatatattccatcatatatatatatacatgtttgtatatatatattccatcatatatatatacatgtttgtatatatatattccatcatatatatatacatgtttgtatatatatattccatcatatatatatacatgtttgtatatatatattccatcatatatatatacacgtgtatatatatattccatcatatatatatacatgtgtgtatatatatattccatcatatatatatacatgtgtatatatatattccatcatatatatatacatgtgtatatacatatatataccatcatgtatacacacacacacacacacacacacacacacacccctcagtttctttatccactcattgattgatggtcatttggtctggttccatgtttttgcaattgtgagttgaacactctaaaatcccaaaggttgagccaatagtcactaaacaggagctcatagtcttcagctgatcctgatcccagcccccaggcctcatccaaactctccaatccatgaggaaagacattcttccaatcctgacctgccacaggcaaaggagctttcccaagactcagagcccaggtacaggttcagcctgtttgtgccacactgacattctgttctgaggcctcagccccctgtggtcctgcttctgggctgcaaagctccaaccaccacccattcccatacgtcatcacacccctgcttctaacctgcctcaccctccacatcaaaaacacgtgtgtctctcctctctcccaaagaactcaggcctggggaaaacaaaagccaggaagggaggttgcctttaggaaaaacccaatgtgtctacagaaagaatttaaagatattgattcaaggtttcagtgagacaggaggagtaggttttagtgccgcatgatgaccacagttaatgttaaaatattattatttcaaaattgccaaaagagttttaacattcttgcaacaaaaaaagataaattggcaagatgatggatatattacttgacttgattggattgttctataatgtacacgtagatcaaaacatcacattgtaccccataagtatacacatttatatttaactgtgaattacatttgttttattttatttatccattttttattgtagagatgaggtctcgccatgttgcccaggctggtctcaaactctcagcctcaagtgatcctcccaccttggcctcccaaagggcggggattacagacatgagccaccatgcccagccaaaaattaattattttttatcaaataagaaatttaaacatctctttcctttaaatcaggatctgtggtgtttactcagctgacctgtgttctcttccataactgccctcttaatattcaatgctgcagtcccactccctaacatcttgctatggcttcaatgtgtcccccaacattcatgggttgaaaaccaaatctccattccaatagtgttgagaggcgggaactttaagagcagcttgggtcttgagggctctgccttcaaacccaatgctctctctctcctctgggtgtcctcagatactgttccctggcctggaatattcctcttccactgaattctctttgcctgatcacctgccatccccacctcaagtctcagcaaaaagccaccttcgcctggaagccttctctgtcccctcatgcctgggtgagtgccatttagagtcctcttcacctggtgttacatagcctgtttctgtatttacggccttcttcagactggaagctccatgaggcagggccatgtctgcagtgcagtgggcactcagtgaatgaaaaaatcaacagtgctcccctgcttttgccgtcctgtcccgaagccagcgtgctggtccctgggcaatgtagggagtgtgggagctctgctttgtacagctcatcactccagtcacttgatgtgggagattgtcatcagctgttgacatacctgacttgcccagctgatctgtgggccacttgagggataggatcatgtctcatttgtctttactttcttagtgctcagcttagtgcctggcacacaccacacacacatgagatttttttttttttttttttttttagttcttaaatccagcccatttctttggggcctgctgtggaagatgaaaatggaagttggcagctggaatggatctgtagacaggaaacctgggagatgacaactgccgtcctgggatgggagcagggtccagggaaggatcaggggctcatatcttccagatttcagctcttagcactcccgcagggctccatctctgacctactgaccggctcctaggaagggctctgccagttattccttttgctttcttcttgcacttcccacagccaaaccatgaaataacaggacctggactctgccagacatgcagacatctcctacccaactggagagctgaaacctgaatattgctcttggccccacttggaatgtctgctccgcagccggcctctcccaatacatacacatacgcacacacatgcatatacacacatgcatacatacatgcacacacatgcatacatataacacacacacacacacacatgcatgcacgcacacacacaggtgcatgcacacacacaggtgcatgcgcaggttcacctgtacacatcacccatatttacttgctcttcaccttttagtctaacacaaattactccaagagccttccctgaactacaacttcatcagcccttctactgatgtatgaacgctcagtgtgctggctggtttcttatttagtgctacatcccccactaggtacaaattcctgagttgcagaggttggctgtcatggtccctaccctgcccctgacgcttggcatagcatctggcacccagcaatgtaatgaataccactgagtgtggaatccctccacaaccatcacaagtaggaagccccagcggttttgagttaactcccagttcaccaaagccagtggccaccatccctactgtctgaagtttcaagccaagctcctcaagtgaggctgagtcaaaagatgttttctgctttgtgacctctcaggctgaaaatacttgagaggtcaagtattgagaaaaaaaggggaggggtggggttaagcagtttgagctctttacaaacaagatgcaagcaaacaaagcccaggccccaggtgaaagataaacataacatgttctataaatcacaattacaaaatattcatctgtcctccttaaaacacaatcccgcataagccattctgaaatatgtaaaatgttgcagcactgttggggaaatgcatgatctcagatttaagaagaaccattgaacccagtacaccccacttgcctttatcttttggtatttccagaaccagaggctccagtaaccctcattttccctcatgccaacaccctgcaaatctgtgtcaccccagatagactgtgggcccagcatttgcctcagctgcactagagagaggtttgccatcagtagcagttaggagattaaatgggtacagtagtctcagacatgggaaccacagagttaaaagttcagaaaagactatgataataaatgtgatagaaagttcaggcaatcccattactgtgcatatgcccaaaggaaaataaatcattctacgaaaaagacacctgcactcatatgttcatcacagcactattcacaaaagcaaagacatggtatcaacccactgcccatcaacagtggactggataaagaaaaggtggtccatatacatcatggaatacaatgcagcaataaaaaagagtgaaatcatgttttctgcagcaacacggatgcagctggaggccattatcctaagtgaattaaagcaggaacagaaaacagagtgtcacatgttctcaattataagtgggagctgaaccttgggtacacatggacataaacatgggagcagtagacactgggaactccaaaagaggggacggaagggaggagggcaaaggctgaaaaactttctattgggtcccatgctcactacctgggtgatgggatcaatcatatcccaaatctcagcatcacgcaatgtactcttgtaataaacctgcacatggacccttaaatgtaaaataaaattaaaagaaaaataaagaaagttcaggccttatatagatcttaactgaaacctaataataacatttgatttgaatatgaagagggagaaagcaaaagagataattattttgccttaaaacatgtgccggcaaacttttgtaaggggacaattagtgaatatttcagactgtgaccacatggcctttgccaaaactcacctctgccactatagcatgaaagcggtcaccaacagtgtgtaaacaaacgactatggctgagttccaatacaagcttacttacaaaaataggcagcgggccagatttggcccacaacccatagtttgctaacctctgtcttatagtagagtggaatagaatggaatggaatagaatagaatagaatagaatagaatagaagaatagaatagaatagttgtgtactcttcccaaatcaataaaagtttaacaacagtctaagaattgcatgtctatatacacatttactgacaaaatgattctgagtttcatttgaagagtaaaataagagtaaataaaaattttaaggaaataggagagacttgcagtaatagatattgaaatgcattataaagctatagcacttaaaacaacgtggaatggacagatcaatggataagaattgatatcccagaaacattccctagtgtatacaaacatttcatttatgataaaatcagcatctcatcaaaagaaaaagatagatttttcaattgataattactagataattaggaaaaagccattcaagtcttttttttaatctatccatcctattctatagcaagccaattttagattaagtagttaaatttcaaaagttacttgaaaatacaacagtgatcaggatgggaaagaactttcaaagcataaaattagggtaacatacaagaagtgaataaaactaacctcttcatctaaaaacacatcactatcataaacaataacaacaaaaaacaaatgaacagtgatttttaaaaacactatagataaggaattaattttctttctacttttaaaactacttagaaatcaatttaagaaaaaaatctatctacctgaaaacaaaatcaatgagtgatcctttctgagttgtggtaatactagcaatctttgtttttatgcttttctgtatttgtctatattttgcaatacaggtgtattacttttataagcataataaagaccaacaatattttaaagcaaacatttaccacaataggagtgggctggaggaagaggttgtgaaaaacatgagattctaaagaatattagtgcaaatggtaataaagacataaaaatgggcatagtcagaactaattaaagaaatgacaatgaaacaccaattttaatgtataaaagtggcagaatttttacaaaaacatataagattctctgtggggaatgtataaagaaattgtattatcatacatgcttgtcatcaagtaattggataaaacacttctggaaggcaatttggcaatatatataaagaaccttaaatatgtacataccctttagtctagtcccacttctaaaacttagtccttaaaagtgaattaggcaggtgcagataatttatgtacaagagggggataacacagaaggataggtgggatgagtgtcctcctgcatcggtccattcttgctttgctataaagtagtacctgaggctgggtagtatataaagaagaagtttattctggctcacaattctgcaggctgtatggaggcatggcaaacagcatctgccactgatgagaactcaggaagtctaaaatcatggtggaaggcaaaggaggagaaggcatgtcacatccaagagtgagagcaagaaggggaagtccaagactcttttaaatgatcagctcttgcataaactaccagagtgagaactcactcattaccatggggatggcactgaggcattcatgagggttccatcaatgtaacacaatcacctccaccaggccccacctccagcattggggattacatttaaaaatgagatttggaggagacacacatccaaaccatattatgatgcccttggccccccagttgacatgcctttctcgcattgcaaaatacaattgtcttttcctaacagtgccccaaagtcttaacttgttctagcattaagtccaaagtcctaagtctcatctgagactcaagtcaagttccatccacctgtgagcctgtgaaatcaaagacaagttatttacttccaaggtacgaaggtggcacgggcattggataaattcccattccaaaaggagaaataggtcaaaagaaagaggcaatagactccatgcaaatctaaaatccaccagggtagacattaaattttaaagctccaacataatctcctttgactccatgtcctgcatcttggtgctagaggtgggcacccaggccttgggcagctccacccttgtggctttgcagagtgcagcccacatggatgctctcgcaggttagagttgagagcctgcagattttccatgctgaaattgcaaactgctggtggttctaccattctcaggtctggagacttccttcccacagctccactcagcagtgccctggtaaggactctaaccctacatttcccctcaacactactgtagcagatgctttctgtgtggcctaagactctgaagcaggcctctgtgtgctttccaatatatcctctgaaatctgggtggaagctgccaagcctccttcactcttgcattctgtgtgcctgcaggcttaaaatcatatggaagcaggcaaggcttgctccctccaaaggtgtggcctaagctgttatctgcagccctttgagccaaagctggagctggagcagccagggagcagtatcctgaggctgcacaggagcagcagggccccaggcctggccctgaaagcattctttcctcctagacctctgggcctgtgaggggagggcctgtctttaagatttctgaaatgcttttaagacctttccccatgttcttgaatattagaacctatcatttttttggccatgcaaatggctaagttgttctcttagcctacttggatttctctcctgaaaatgctctttccttctctactacatggctagggagcaaatttcaaaatttttatgctctgcttccctttcaaatataagttccaactttaagtcatccctttgctcctatatctgttcataggttgttagaagcagccatgccacatcttgaatgctttggtgcttagaaatttcttccaccagataccctagatcatcactcttaagtgcaaacttccacaatgacctaggatgtgatcatgatgcaaccaaactctttgctaaggtgtaacaagaatgatctttgctccaattcccagtaagttcctcatttccatcagagacctttccatcctggccttcattgtccatatttctagtggcattttggtcgcaaccacttaacaagtctctaagaagtttcaaactttccctcatcttcctgtcttcttctgaggccttcaaactctttcaaccttgtatgagtctgttttcacactgctgataaagacataactgagactgggcaatttaaaaaaaagaaagaggtttaatgggcttacagttccacatgactagggaggactcataatcatggaggaaggcaagaaggaacaaatcacaacttacatggatgacagcagacgaagagagagcttgtgcagggaaactctgctttttaaaactatcaaatctggtgagacttattcactaccacaagaacagcatgggaaatacctgctcccatgattcagttacctcccacttggtccttcccacaacatgtgagaattcaagatgagattttcgtgaggacacagccaaaccatatcattctgcccctggcctctcccaaatctcacgtcctcacatttcaaaaccagtcatgccttctcaacagtcccccaaagtcttaatttgcttcagcattaactcaaatgtccaaagtccaaagtctcatccaaaacaggcaagtcccttttgcctatgagcctgcaaaatccaaagcaagttagctacttcctggatacaatgggggtacaggcattgggtaaatacagccattccaaatgggagaaattggccaaaaccaaggggctacatgccccatgcaagtcagaaatccagtggggcagtcaaatcttaaagctccaaaatgatctcctctgactccatgtctcacaccaaggtcatgctgatgcaagaggtgagtactcatgctcttgaacagctcctcccctgtggctttgcagggtacagcctccctcctggctgttttcatgggctgccattgagtgtctgtggcttttctaggtgcctggtgcaagctgtcaatggatctaccattctggggtctggaggatggtagccctcttctcacagctccactaggtggagcccgagtagggactctgtgtaggggctctgatcccgtatttcccttctgcactgccctagcagaggttcttcatgagggccctgcccctgcagcaaacttctgcctggacatccaggcatttctacacatcctctgaaatctaggtggaggttcccaaacctcaattcttgacttttgtgcacctggagtctctataccacttgggaactcccaaggcttggggctttcaccctctgaagccatggcctgagctgtagcttgacctgtttctgtcatagctaaacagcttggatacaaggcgaaaagtccctagactgcacacagcagggggatcttaggcctggcccacaataccatttttccctcctaaacctgtgatgggaggcaccactgcaaaggtctctgacatgccttggaaacatttttcccattgacttggtgattaacattgggctccttgctacttatgcaaatttctgcagctggcttgaatttcttctcagaaaatgggatttgcattatcaggcctattgcattgtcaggctgcaaattttccaaacgttcatgctctgcttactttatgaaactggattcctttaacagcactccagtcacctcttgaatgctatgttgcttagaaatttcttctgccagataccctaaatcatctctctcaagttcaaagttccacagatctctagggcaggggaaaaatgctgccagtctctttgctaaaatataaaaagagtcatctttgctccagttcccagcaagttcctcatctccatctgagatcacctcagcctggatttcattgtccatgtcattatcaccattttggtcttcttctgaaccctccaaactgttccaacctttgcctgttacgtagttccaaagtcacgtccatattttcaggtatcttttcagcagtgccccactcccagcaccaatttactgtattagtcaattttcatgctgctgataaagacatacttgagactaggcaatttacaaaagaaagaggtttaatagacttaccgttccaagtggctggtgaagcctcacaatcatggtggaaggcaaggagaaacaaatcacgtcttacatggatggcagcaggcagagagagcttgtgcagggaaactgccccttatagaaccatcagatctcctgagacttattcactatcacaagaatagcacaggaaagacctgcccccataattcaattacctgtcactgggtccctcccacaacacatgttgtgtttgggtggggacacagccaaaccatatcaaacctcttcccattaccacattttcaggtatctttacagcaacaccccactccttggtaacaattttctatattagtctgtttgcatggctataaaggaatacccaaggctgggtaatttgtaaagaaaagaggtttattttggatcacaattctgcaggctgtacaagcatggcactagcatctgctcctggtgaggcttcaggaagcatccaattgtggtggaaggtgaaaggggagcaggaacatcacatggcagcagtttgagcaagagagagaggcagggaggttccagattattttaaacaaccagatctcatgtgaactaccagagcaagaactcattcacgaccatgggagggcaccaagctgttcatgaggtaatccaccccactgacccaaacacttcctaccaggcccctcctgcaacattggtggtcacaacatttcttttctttcttatttctttttttttagtttttttttctttttcttttttttctttctttttttttttttttttgagatagggtctcattttatcacttgggctggcatacacatacagtggagcaatcatggttcactgcagccttgaccttctcctgggcttagttgatcctcccacctcagcctcccaagtagctgggactaatggcatgcaccaccacatgcagctaaattttttatttctatttttgtattttcagtagagacggagtttccccatcttgcccaggctggtctcaaactcctgggctcaagcgatccacccacctcagcctcccaaagtgctatgattacaggccggagccactgcatctggctggaggtcacatttcaacatgagatttgtagggcacaaaacatccaaaccacatcacctctctgagcttaccatcagtgggaagctgaccccacttctggcactgcataatttcttttccatttgtgacaaattattggtttcagcctggaccctgacaccaagaatgtcctcaactctcagcctgcacttgataagcaccttacacaagtttctggaaaagttgctgctcaagatgggccagccacatctctgatgcctgattactcttatccctgaaaggttctcatctttctccttccctaaatgggctgagtctggtgtcaagggggtggtgttttgtgtcaaaagacctggaggtcttagcctatgttctgcacagcgtgatcttgggcagaccacttcttctctaactcgacaagcatgtactgaccacctgccatgtgctgggctctgtgccagggtatatactggtgaacaaggcacctgggatgaaacttgcacacttgttttttttttatctttaaaaaataatgagaatgtgcttatcctccacccttaatgtgcttaacccttccaccttcagctattgcaaggcaaaacaaagacagtatatgtgaatctgctgtacagtcaatgaagttctacaaccctgcaaaacattttctttagggtactccaagttatgctatgagcactgtagataacaaggccatgaaatctctttctccgctgtgccttgacaaagatcagcaaagtatcctggaaggtcctaatcatcctagagcaagactggatgaggtgggattcttattctgggtcacatagtggtggatattgatgaagatttttctgatacagctcagttgcaaaggcaaaaatccaagagtcattctagaaagttctctcttgaccaacccttccccatcaccatattcaaactgccaccaagctctgttatttcccactttcctccagatcatttcagaatgctgtgtaaaattgtttgaaatctttcttttgctcttaggataaagacccactgtctacaggcagaaatgagccaatccctcctatttaacatcatatctaatacttctgtcttccagcctccctgacctcaaatgcaccaaggcctcctgccccagggcctctgcacagtatgcttttgttgcctccttcctcatcccctttccttacatattccttttgtctccttccaattttatatgtggcctctgaaacatcagttcctcagcaaacttatccccaagccccaaatttggataagattcttctcttgacaccccatacagttcataaaactttttttgtttgtttgtttttgagacaagggtctcactctgtcccctaggagtgcagggttgtgatcacggctcactgcagcctcaaattcctgggctcagatgacccgcctacctcagcctccagagtagctaggactacaggcgtgtactaccaagctcatctaggttttctttttttttggtagaggctgggtcttactatgttgcccagactgcacacaacttttctatcctaagctaagcttgtcccagtttgtaagataacttgattatatgtccctattgtgagatatttgatttcagactctttgtctgtttcttcgttttttatttttatttttttgagacagacttttgctcttgttgcccaggctggagtgcagtggcacaatctcagctcactgcaacctccgcctcccgggttcaagtaattctcctgcctcagactccagagtagctgggattaaaggcatgcaccaccacgcccagttaatttttttgtatttttagtagagacagggtttcaccatgttggccaggctggtctcaaactcctgacctcaggtgatccacccaccttagcctcccaaagtgctgggattactggcgcgaaccactgcacctggcatgtttcttctttcaaaggtaagctccctgagggtagattcctattgaatagacgaatgaacaagtggagaggaaagagcttgaccatctgcactggaggtgaaagctaaaccctggaacatcaaaccgatggccacactgaaatgacagccaggaaaccgggccttcccacgggccagcatgggacgcctcatgtccatgatctgaccacctcctgcacatggacatagagcagggaacaccatgagcagcaggggagattttaaggaggaagtagaaaataaaagaggacctcaatccccatgcctgtgagacatgagggctctgttgccctgtggattctgttttatgcttccttttctgccttttcttcttgtcctgtgcttttccttctctagtaaagcgctctgtattctaaacgtggtaataaaccaagtggccttgtctgctctcatctttaaccagaaatataatctcctcgttaacctttggggggaggtctggctctgcccctcaagggtcagaggccagaatatttgggcatgcccgtggccttagcttccttggtcagcctgagttaatgggagatcagcatgtggggcagagctctcatttgctgggggtggagggggcacagtcattaatggtttctatggcaaaacactctgggtcttttgcatttgagagcattgctacttatttatttatgtatttatttatggtttagagacagagactcactctgttgcccaggctggggtgcagtggtacaatcgtagctcactgaagacttaaactcctgggctcaagtgattctcccacttcagtctcctgagtagctgggttacaagcgcacaccaccatgcctggatcattctttttattttttcttttgtagagacaaggtctgggtatattgcccaggctcctgggtatattgccagaggtctcgaactcctgacctctagcaattccctcaccttggcctccagaaattctgggattataggcatgagccactgcacctggtgggagcattgttatttaaaagtttgtggatattcttcctgtgactagtgtggaatcccgaggccccaggaaattcagacttatgtttcatgatggggagggtctaactccttatattattccttctgatcgtactcacccaatggggagaaataaaatgaaaagaataccaggtgagccacttcatctgctatcattttggcaacaagaaatggaagctgaccgggctcaatggctcatgcctgtaatcccagctctttgggaggttgaggtgggaggatgcttgagcccaggagttggacaccagcttgggcaacatggctaaacctcatctctttaaaaaaagtataaaaattgggcaggtgtggtggtgtgcacctgtagtcccagctactctggaggctgaggtcggaggatcagttgagtctgggaggtcaaggctgccgtgaacaattattgtaccattgcactccagcctgggtgacagagccagaccctgtctcaaaataaatgaataaaaagtgggagctatttctgcagcatccacagcaaacagagatggacttactcccttaaatctgagctgagttggccaaattctcactgcgtaagttggtctaatgccagcaacatttcctggatatgagagttttcagagctcttagaaggggttgggccaagcatggcggctcatgcctataatcccagcactttgggaggccgaggtgggcggatcacctgaggtcaggagttcaagaacagcttggccaacatggtgaaaccccatctctactaaaaatacaaaaattagccgggcatggcagcaggtgcctgtaatcccagctactcaggaggctgaggcaggagaattgctagaacctgggaggcagaggctgcagtgagccaagatgtctccactgtactccagcttgggcaacaaagcgagactctgtctcactttttaaaaaaaaagaaaaagtgggtgggggaggttggagccatgggtgtctgactctccctgggatgatttacatatattatctcatttaatcttcacagcaagcctttgaggcaggcagcatgagtcagctgaggctcaaagagataaagccacccacccaagatagggcagctggtaagtgagatgccacctacaccctcagtcctacttactcggaagtccatgtacgctgatgtttgctgttaccacactctgtggttctgccactaccatccttgtgaaactcgtgaaagctgcagacatgccacagctcagccttcccaattataaaaggagaataaaaaatatctccaagaggatggagttttctagagctccttcttccatctagttgatgacccttagaaaatgcttagtaaaatgagaaagcatttttaataggaaaaggtcaaatgaagaaatcttctagatgacaccataaagctttaaaaaccctttcgacttctgttctaagcccttcttcccggtactcaggccaagagaatcccgtcttggcatggctgcctctgaaccatttttgcagagagtcaggcattcattcattctttccctgaatgtttcctgagcagttctgaccaaagcacaggggagtcagccactattcctgccctccagttgctccttggcttgcatcttaatcttctgggctgctataacaaaatagcacacatgggatggtttttaaacaacagaaacttgtagcttccacggttgaaggctagaagttcaagatcaaggtgctggcagacttggtgtcgggggaggtcccgcttcttggttcatagaaggtgacttctatgtgttctcagatagtggaagaaaacaacagtggtttcttccatcacttataaagacaggaatcccattcatagcactccaccctcctgacctaatcacctcccctgccctgcccacttcctaacaccatcacatgggggattaggtttcaacacatgaattttggagaggcacaatgattcaatccctaacatttaacacataagtcttgcaagtagcttgagggtgtaggaagcaagtgctttgggagctcagagcagtgtacctggcctggcttgactggacatgcagcttatcttagaagaccatgcgtgatggaagttctcaggtgttcactcttgaggttgcaccctaggctctctcagatgctcccctgcaagccactgttccccaattctctgcaagggttcacctctggccttcaggacaaagtggagacttgggcacccttgggcaatgggaccccttcaggtggacagataaggtttatacccagtctgtggggccaggtcgggatcatggcatgactgtgggcatctcggtgtgccagggtgtctctccagcactaggggacccaggattgccactgttaggtatctggtagttcagctcaacacacatgatattttagcttcttgaatttttcttattggaccttagaggcagaggacctggttaattatgctccttggttcaagacactttattatggtgggtcaagtctaggccctctgttttgttttgtttttttcttatacaacttttattttagaatcacagggtccacgtgcaggtctgttacacgattgcacaatgcacgatgctgaggtttgggatatgcttgatcctgttactcaggtagtgagcatggtgcccaataggcaggttttcagccctggcccctcttcctccctcccctgccttatagtgtctattgttcccatttttatttccccatgtatacccaacattgaactcccacttataagtgagaacatgctgtatttggttttctgtttctgcattagtttgcttagaataatggcttccagctgcatccatgttgctgcaaaggacatgatttcattctttttttttgtggctgtgtagtgttccatggtgtatatatagcacatttctttatctgatccacagttgataggcgcctgggttgattccatgtttttgctattgtgaacagccctgtaatgaagatacgggtgcatttttggtagaatgatttgttttcctttgggtctatacctaatagtgtgattgctgggttgaatggtagttcaattcttagttctttgagaaatctgtaaactgcttttcacagtggctgcactaatttccattatgtctgatctctgttgtttttatttttaactctccccccactttaaattttacacaataaagttggaagacatttacattgatcacctgtatacctaccacctaggtcctaccttagcacattattatagtttaaaaagatcatttttagtagagacggggtttcatcatgttggccaggctggtcttgaactcctgatctcaggtgattcccccacctcggcctcccaaagtgctgggattacaggcatggcaggtgcctgtaatcccagctactcgggaggctaaggcagcagaattgcttgaacccaggaggcagaggttgcagtgagccaagatcgcaccactggactccagcctgggcaacaagagtgaaactccatctcaaaaaaaaaaaaatatgtctatctatccattgatctgaacttctatatgctgatgaatctatttttcaaatgcatatcaaggtaaattgcagatatcagtagacttacctgccaagacttgagtatttacttcaatattttagtgctttttctcctttgttgtaaagtttacataaaaatgaatatacaaatattaagtgcactaattatgagtgttgacaatatgtacaccattacaaccctaacctctatcaagatgtagaacattatcttcttctagaaagttccctgaagcccctttctgacccatcctccacccaactccacagaggcatgcactactccaggtttttccctttatagattagttttgcctgccctgaatctttacctatatagaatcatagatcttacaatcttttgggtagggcttcttttactcagcagaaagttttcaagcatcatttgtgtgctgtaggtatcaatagtttgttcttttttgttgctgagaagtattccattatacaaatatgctagaatttgtttatccattttttaggccatttccaccatttgaataaaactgatgtgagcatttaggtacaagtcttgatgtaatcttatgttttcatttcttcctaattaatacttaggaggggaattgtcatgtcactggctaggtatgcttttagttttataagaaaatgccaagacttttgccaaaatgaatgtactattttatcttcccaccaacaatataggaaggttctcaccggccccacatctttgcccatattaggtgttgttgaactgaatgtgaagcattctgccaggtgataaggggtgtcccattgcagttttaacacgcatttcactattagctaatgatgttgagtgccgtttctcgtacttgttggccatccctttatcttgttttgtgaagtgtttgtttaaatattttgctttcatttctttaatttggttatttgtccttttattattgaaatgtgggatcctttatatgtcctccatagtagcactttgtgagacatgttttacttctatttttcccagtctgtgtcttgtcttttattttcatagtggcttcttttgatgagcagcattttataattttgaagaagtgtaaattatcatgcttttctttctttcttcttcttttttttttttttctgagacgagtttcgctcttgtcacccaggctggagtacaatggcgcgatttctgctcactgcaacctccgcctcctgggttcaagcaattttcgggtctcagcctcccaagtagttggggttacaggcatgcgccactatatgcctcgctaatttttgtatttttggtacagatggggtttcgccatattggccatgctggtctcaaactcctgacctcaggtgatctgcctgcctcagcctcccaagtgctgggattacatgcgtgagccactgcccctggcctatcatgccttttttttttttttatggccactgtgtgctgtgcccctatccaaaatcttgtgcctactattggttcacaaggagattctgttttcttcttaaagctttatgatttagcttgaatatttaagtctatcgtccatcttatattgtggaaaaactttttttccctattatactagtcctcacttatccatgaaagagatgttcccagatccgcagcagatgcctgaaaccacagagagttccaaaccctacgtaccctgtgttttgtcttatacacacatatctatgataaagtttaatttataaattaggcataataagagatgaacaataataactaaaaatgaaatagggcaggctaagcatggtggctcatgcctgtaatcccagcactttgggaagctgaggtgggtggagggtgaatcatctgaggtcaggagtttgagactagcctggccaacatggtgaaatgccatgtctactaaaaatacaaaaattagctgggcgtggtggcatatatctgtaatcccagctacttggaaggctgaggcaggaggatcacttgaatccaggaggcagaggttgcagtaagccgagattacacaattgcacttcagcctgggcgacaagagcaaaactccatctcaacgttattcaagtgccatttgttgggaaaaaaaaaagaatgaaataggacaattagacaatacgctgcaatcacagtcgtgtgcatgccgttttgctctctaaataacttactgtactgcactcagccttcttcttgtgatgacatgggatgataaaaggcctatgtgatgagattccatgaccgtcaatctgataactgagacagctactgagtgactagtggtgggcggcacctacagcatggatatgcaggacaaggggatgacgtccatcctccgtgggacagagccggcggtgccggatttcatcgcactatgctgaactcccagcaacttaatacttatggatggtttgtttctgaaactttttttttttgagacagagttttgctcttattgcccgcactcgagtgcatgcaatggcacaatctcagctcacagcaacctctgcctcccggtttcaagtgattctcctacctcagtcccccaagtagctgggattacaggtgcctgccaccatgcctggctaatttttttttattttttagtagagacgggctttcaccatgttggccaggctggtcttgaactcctgacctcaggtgatccacctgcctcggcctcccaaagtgtgggattacaggcataagccaccacgcctggcctgaaactttctatttagtatttttggaccaagattgaccacaggtaatggacaccgtggagaatgaaaccatggatgagagggtgcaactgtgctgttttaaaaattgaatgaatgcctgtgtgagtccatttcttggttcctcctcttctttttaaaaagtatggcttcttttgtcttttccttctccattcccatgtcctgtcctcaaacatgagatgccatttgtaatgtgttgaaactattcatttattttgtaaatgttcttggaaaagatgaatttttgttttgtgtataagtgtctttatacaactgatattgcactatacatcttatggtgttaactgttgacctattaaaataagatatatatgatatctacatgtctttatctatatctagctatcgattgactgatctattgatcagttgatctatctcttttaatgagccattaacattgccatgagctaacactttctttctttctttttttttttttgaaacaggatcttgttctatcacccggactggagtgcagttgcatgatctcagttcgttgcaacccctgtctcctgggttcaagctattctcctgtctcagcctcccaagtgcctgggattacaagcacataccatgatgctcagctaatttttgtatatttggtagagatgggatttcaccatgttggtcaggctggtctggaactcctggcctcaagtgatcagcctgccttgtcatcccaaagttctgggattacaggtgtgagccacagcaccaacctgagctaacagtcttgtgtcagggtaatgctgttttgtgtatcatgtctcaactctctaatatctcagtggtggacatctgctcacctccaactttgtactaccaaaatcaatactgcagtaacatggccagaaatatcctgtggacctgaatgagaatcccttttgaggtagaaacccaggggcagagatcctgggtaatagaatatagaagacagcattttctaaaaatgatgaccatacctatcccatcctcacacactttctagaatgtgaggttgacactcttcattgagaggtgaagttcccattctcttttcttgatcctgggttgcagccagttgaaacggtgctacataatgctgaggctaggtcattgaaatatcatgcacctttttctggatctgtggggcccctcactcttgggacatagtccccatgctgagtggcagccaagcagccacaagatgaagtcacctggaagaatcccggccaacagcctcaactaggttgctagctgatggccagcaagcaagtgccaggcatgagagtgagtttctggtggttccagcccccagctatcaagtcaccccccagcctttgagctaccctggccacaaggagcagagataagctttccctattaagcactgcccagtttgaagactaatgagcagagtaataattgattttttaaagccactgagtatacggtggcttgctatgcagcaaaagagagctggaacgtatgaattcagggtatgaatctccaagaaatattagaggcggcccctttgcagggcttcagattctattctcccaacatcagtgccccaggcccctctgccctcatgtctctgctgtttacttagcattgcctcttactaattttgcctaatagttgccaagtaacagctcatccattaaaattgtgtttttctgattactaacgattttgaacacttcttcgcatgcttctaagctttttgggttttcccttctgagaaatgcttgttcatacgtttcccccatatttatattaggctgctgtctttctgtttgttttgcaggaggtccttctctagccttgatattagtcccttgtcagtttcagtcgttgtaaatatctttttgcattcagttacctgcctttgacagttgcttcctagccacagcagacaaacgacagaatgagagattccatggagaaagagcccccatctgtgccgtcattgtcctaagctctttaaagcagttctcaacaacattttctcacatttttgtacaatgccctgccgtctaacaatatatgcatatttatgaatttaattattaaaacaaccccaaaagatagctattgccactctccctgtattttgtagcttggtaaatgaaagcctagctagctgaagtgacctgcccaaggtcacacaatttttacatgttgtcagaaaatatttaccatcagctccattcttcccacggtccaacagagctgagggctgagggcagagaaaggacttccatcagatcaggtgataattcagtcccttaggagaggtgaagactgctgagtggacccaagcgattcagccttggagccaggggtctggagacaaggcctacctgtattaccagctccatgtttgggtgaaacatttctcccgtctaggcctaaatttcccaatccagaaaacaagctcaattgtcataatgacaatgacctcccaaatgaatcacgaaagttaaaagaagtaatataaactgtgaagtatttttacccaaaaagtctaaggaattagttcacctggacaaaaaccctgggttggagtagctatgtcagggtttcaggcttagctcaggtcctgaaaagctgtgtggccctgggaaaactccttcacctctctgggctgcagggtgcttattggtctaaggaggcccttacacacatctctacaggcccttccagcctagagattcaagctgaacctgagctagggtcagaggcggttcccagggaaagagcaggggggtgtgtgtgtgtgtgtgcgtgtgtgtgtaagtgtgcatgtctgacttgtgcatgtataagtacacctctgagttcacatgtgcatttgagcctgtgtaagcaggtgcatatatgtgcatatatgtgcatatgtgaggctatgcttgtgtttcggagcatgcatgtgtgtgtgtgtgtgtgtgtatgtatatatttgtatatatctatgcatgtaagcatatgtgtttgtatgtgaagagagtgctgtatcttgaaaaaaatgtttttgagaattaatagatgtgcatcttttccttgaatttcctggattataccccaaggccctttcttcccacacaatgagaaaggtgtggtttgctgttctggggactgggcggtggtgacagaaggcagatagtagggacgggtgtcatggaagcatccagatgggtgtgcactcttgcttccttgggttttcaagccctcctttctctgcagagtcccaggttgggctggtggaagaggcaggaaccaggaggacaggacaaacagggctgagaacagaagtgcctgagcatggggagccaacctggagagcctggccttcttggcctcttcctaccctctgatgagcaccagcgcctagcagcagcccacaacagacactcacaggtgtgttggggctgtgtgtgctgggggtggggtctctgctgctcggctcacggtgttggggaggactgactttgctgcatgggaaagggcagggataaggagcagggctgccccagtccagccggatccaggctctgatggacatggcagccctcactccttctcctccagccctgtggggtgcagctgttggcctcttcctgctgcaccacttccagagccacctgggcctggcagtttgtcaccactaaaagcctcatatcctggctccccctgcactattaatctcagaaaaacgcattgtcaaacctaatgaaaaaggggaagccaccaaggagaaggtgtccacacctcgggctgacagttgtcaggcaggcgggcagcagcgtcctgctggggacagagctggatgaacagaagcagtggaaagtgcctggggagatgggcacggggactcaggaccccgtgcacggggtgagcttgtgcttgccaacagcagaggagggaggaccaaggacaggaggcctggggcctggagggacactgtcagggacatggggcagcactcccaaagagaagtaccacctgaccaggactcccagaaaaggaagcccctggcagctgccagctgtgtccccagccctgtcctatcctctaagaccaagcaaagggggaaggactgagctccaatcagaggccatcaacggaaaggcctcaggcctcacctggcccattgaaaggtttcacttggtctgttgagtgttgaaattgttttcaatgatataaaatttttaattgggatagcctatgtaaagagcgagatttgcaatttctcttgaaaaatgaaaaaaaaaactgaccatttttggtttgggggtgtgatgagctgtagctgcagggtcgtgactggtgggcatgggcttgccggccgccctggccgcagcactcctggcggctggccacatcccttgccactcactgcggcagccgtggaagtcttcgttattcatagatgccaagaatcttcagtgtcctgcagctgcgtatgaatttctctttctgctctccctcagccatgtgttggtgctgtgggacaagccagggttttgctagcatgaaaatcaaaggcagtatattttagccttcccatcacagaccctctcctgtccccttctcattccgggactggttctctctcttattcagccaccattgcagttcacagccctccctccaaaggctcctatgaacccagagatcataagtcaatctccccctggacccaccacaccccttgtagattgcccaggctgaagactgataatttggagctctttcaacaggcagtgcattctgttggcaagtgggttctgagcatctcctgccattgtgtgcccagatgggggaacaaggggaaagacagcacctgtcacatcacaggcccaaggctgccagagagtgaccaaacccagagaggtaacatatgtgtgacagatgagtgtggagcaggctggagtcaatcaggagggcttcctgcaggaggaggagcttaagctggctagtgagtgagtggaacagggtgaagagcttgcttgctggagcaggctaggcctgagctccaggatttgatctttttgggtatagctatgtgctgttgggtgtggcatttaggatctctagacctcagcctcagtatctaaaatgggaatggttctagtgtctacaccctttccagcctcaagtactgcaaggctcagcctctgtctttctggagtggtttggtcatgtttgctggagtgagtccctcctgggcttccttagggctggtcccatctgctctgtgtaccgggactcaggataagccacatgggaggtgaccaagaatcactttttatttggccaaagatgggggaggcattgtagggattactgcaggagccaaggtcactgccaagtagatgagatggagaacaaacccacgaggtgttcgctgcaagttgaaaagtgaaatacttggcctaagcggtttcataacattcctcctatctctctatgccccccaagccctttcctacatttgggagggatggctgtggtgactggggaaaaagaactagagagttctaccagttgtctatcagacaagagcctatgatagactgagggaagctgggcagaaaataagctaagggtcacattgtttcccaagctcaatgagaattggcaaagctgcattataatttcagaagtatgtgtatggtataagataactgttggcctcattgttaacctggaatccttggcctctgggaaggatggtgtcttcttatgccctctccttcaactctcaggatgagaaactacaattctgagtggaaggaagggcatcccttagttcatggggccagtgggaggctttcttcctgtggggcctctttgagccttccagatggttggaagtggccctttatccttgtgggaataagggtgagaccgagggaaaagacaccgttagtgcctggctagattttaggatggcacccactgcagatcaccttctggaggtctgggacacccaccgcagatcaccttctgcagatctggggcgtccacagtagatcaccctctgcaggtccaggacacccaccgcagatcaccttctacagattgggggcacccacccgcagatcaccctctgcaggtctggggcgctcactgcagatcactctctgcatgtccagggcacccaccaaagatcaccttctacagatctggggcattcaccctagatcaccctctgcgggtccggggcattcaacgcagatcacccaccgcagatcaccctctggcagatcaccctctgcaggtcgagggcgttcacagcagaccaccctctgcaggtccggggcacccactgcagatcacgccctggaggtcttggcagtttgtgagcacaagcacatgcattttcgtatcctgaggagaattcactggtgtcatcccagcttctccgagtctgccctttccatggatgcagagaaattttccatttcagtgaccttctccacctatatttcatgactcgtgtgccaccctctcctcggagctttgagctgagaccacatttccacccccggcatcccaccgtgcctccactccaagctctctgcacctgccaggtgagacagggctgatcagaagatgctgtgatgagataaatcactttcccctcatcgccctgaggactctcgtagcctcctgttctgtgagatgtcttctagacagtgaattttccccgaggccctgggagcaggagcaccctgccccttggggatctcattggctcctcttcaggtgattcctatgaggtggcttccatgtttggtgctggtccacactggagggccaggccctatcttatcggtatttgtgaccctccgagtgccagttgagatctggcacagaagcactcaatgactgtttgcaaagaaaatgtgtgagttgcagagattcccttagacctatgctacaagcctgttcagagaatgagcatttgcaggagataataagtgggagaagatgagactgtgacccgcggagagctcatcagcactttggcaaacttgggtctccacatacggctcagctaggctgtgatttacctactcatgtgtctcagtcactctactagggctgggaggcagagagagaaaaggcaggagggaagggagggagggaggggaggaggaaagggggcaaggaggaagggggaaataaaagacttattttgcataatagagatggagagcattggtgggggggtggtgggtatgaaactcatacttttgtaaacacacaaagagagaaaaataataggtgtgcaggtaggtttgctattctgttcatcactgcccctctaatgtcgacagccagccctaaagtccaaatgccccacctggggtagcctgcaggaatccgtcctgtgctgcaatccctacaggagcccggggacagtacactggtgaaagccatccgatgtgtcttatttttagcagcagggaaatgtggacacctctgggtcaaccctgggattcaaatcatgtaacccaggtctcaaattctctcttgctcttctcttcacctatgtggactctagagttacaaatccctcctggacagtggaggtggagtgtggccagctgtcattttgacaggtcttccttgctgttgtcctcggctgttcaggtgacccccagatgcatgtggctgactgtgcgtggcctgtgtagaccagggcaccttggtagtttccttagtaacctgagcatgctgagaaggcatggttttcatgtgggccaggtaggggacagccacttcaactcaccaggtaaatggcagtgggacagggcactggcctgaccacactcaggaaaacctcacagagcacagaagaagagtgatgcatacaccatctccatacagcctgagggaccgcatcgccctgtgtctgcagcgacacggactgttggatcttcagtcaattcagaagacatcaacccatcagtctgtcatttaccatcattttttctttctttctttccttttctttttttttttttgagacagaatctcactctgttgcccaggctggagtgcagtgccacaatctctgctcactgcatcctctgcttcccaggttcaagggattcccctgtcttagcctcccaagtagctggaactactggaactacaggtgcccgccaccatgccctgctaatatttgcatttttagtacagacagggtttcaccatgttggccagacttctctcaaactcctgacctcaggtgatccgcccaccttcacctcccaaagtgctgagattacaggcatgagccactgtgccaggctcatctaccatcatttaaacaaaaactcatgtgcctccttctaactctaggtctgttcaggagcaaatgccactggatgtacgttggatcccactgtacatctagggccatgacttccacaccttggcatacctcggcatcacctgtagggctgcggccccagccctgagggctcctgaccgaggaggtctggggtgaggcctgagaacctgcatgtttaacaaggtcctaggtgacaccgatgctgctggtctgaggacagcactcaccatagtcagagaaccgtggtccaccggaaaagtgtgaatcctcggccaggctggatttatccaggattttacttctcctcctgcttttcttccttttctagagtccggccgggaggactgcgggcagctgggacagaagtgtttggaggtaacacgttgtatgtgttttccttgttctcctgccctgctcacctcgactcccttccacagctgtaggctcgctcctctgctgtgggctttcctctgttcctcagtcaccctctgaatgagggcaccctttcaggtgatgacacagacactccacagacatctgccggctgcccagtctccaaatgccctgcagagatgtgactggaagagtttggggcaattccaagggagtccgttgagagaatcatcccagttggttggaggagggcaaagaggtaagactgagaggagacgctctgtaagatgagcacgcaagagtatgccagggcagagcgggcacaggagagcaagcaggagtgggggacagggacgtgtgctatcttcccaggcagctagagcccaaagccatgcacaaagggaaaatcaccaagaggcaaaatgaccactgaacaatctcccaggatctgccaagtcaatatttttgtcattgttgttgttgtttgacacagggtcttgctctgtcactcaagctggagtgcagtggtgccatcatagctcaatgcaaccttcaccttccaggtcaagcgatccactcatctcagcctcctgagtagttgggactacagacacacaccactacgcttggctaatttttttcttttgttttgtaacacaaggtctcactttgttgctcaggctggtctcaaaccactgggctcaagtgatacccccacctcgaactcccaaagtgctgggattacaggtgtgagccagcgtacccagccccaagttaagactgaggaagctttcagtgacgcctccactcaggcccactccgagacatagattctgtccaccccagtggaccgggggcagaatctgtgctacttcattgtcattgtaagcttttgtttgttatttttagacttactttctttcatgtgagttatgtggatggttgaatcctcatgatttcttcttgcacaggatatagcatccccgatttcacctttggagcggtgatcatatagtttattgcacaaatcagacattttttttttcttttaacaaagttaagatcacaaaattttataccttgctttttacatgttataggatataaacacttcccgtttgactgaagtatctacttaatcaaaaagactgatgcttgtgtaatattccattttatgagtgtatcataatttatttcatcatttccacattgttgaacattcagtctttattcttctacttgtcattgtcatttttatgtaaggaggacatctttgtgtgcacatctttgtggtcattatggattgtttccttaaaagaaattcctggaaaagcattattaggtgaataaaatgactgtcttttaatcccaaatagggtaatagtacctccttcctcaacttactaaagaagaaaaaatcaagaagtcgtgaaactgggtcctgtcaacatcttactccaggaacctctagcaagagcacagccatgccccccggaagaggtggaagaccctgcttcctctccatctacacagtcttctccctacagccatgccccccaggaagaggtggaagaccctgcttcctctccatctacacagtcttctccctacagccatgccccccaggaagaggtggaagaccctgcttcctctccatctacacagtcttctccctacagccatgccccccaggaagaggtggaagaccctgcttcctctccatctacacagtcttctccctacagccatgccccccaggaagaggtggaagaccctgcttcctctccatctacacagtcttctccctacagccatgccccccaggaagaggtggaagaccctgcttcctctccatctacacagtcttctccctacagccatgccccccaggaagaggtggaagaccctgcttcctctccatctacacagtcttctccctacagccatgccccccggaagaggtggaagaccctgcttcctctccatctacacagtcttctccctgggagctagatagaaaatgctgatgtaatcggcattcagacctccaaaacaaaattaaaagactggccaggaaaaaaaaagaaaaaaacttctgtgtcttcagacactaaggcagccttcaaaagccttctgagcacagatggctgagaggtcagagaacgggaaacccagggtccctccgtgctaatgctggtgcccggtcttggaagatctgggtctcctgccagcttccctcctcacctgtcccagagtcagaaggtgaacatctttaagcctaatggggtgaatgcttactatactaggagctcatttgtaacataagggccctactacaatcccactcctcatgcaaaattgccaatttatggcaatattccttgtttagaaaacaaggctatccaaacactataattacaacgtgcaccagaagccgagagttccctacattaatgcacaggctccagatacattcgtcaaatagagttttttttttttttttttctctttgccttcttctctgggtacttttaagttcagggacagagaacatgtcttcattagaaacattaacattcacaggctgtagtaaattttgacagtgaaaaggtctctgtaacctttagttgtgcagaaatttacttcccaagaaaattacatctggcactgtcttaattaatgctagctttcttttctgaaaattgtgggcttgtcagtaaaaaaggcagaaaaacctgaatttaaaaggctggacacaaaagacgccgagaaataaagctctgtgagatttcataatattgctctgtttttgttctacagtaagaagatgaaaagatctcatttgattttgccaaatgcagcaacatacatgtaatgtagaattgatttgcattttctctcttttgtctctgagttttatcatgtaaagtgtgcttgggaaggtattctattttaaaagcaataggtcaaataaaatccatacctacgaggaaaaaaaaataatgtatgacttcatttttttagcctttctctaactgctagtattaatcgcagctaacaggaagaaccgtggctgttttcgcaagtgaattttgattatctgacattctctctcccggtttaaaatgggttctaagtatgatgggagagcttggcttcacgtccggatatttctattttgcatggcttggacgtctattttgaaaataagatgctttggctttctttggggtttagagattaccctaggtttattttttttcttctctattcaactttgcattttgatgatctagcattacctttctccagtttgagaaaggagcctcaaatacatggtcctaagtcattctttctaacgtgtgttttgtgtcatgtgacatgaaacttttttttttttaatttactttaacttccaggatacatgtgcagaatgtgcacgtttattacttagatatacatgtgccatggtggtttgctgcacctatcaacccctcatctaggttttaagccctgcatgcattagctatttgtcctaatgctctccctctccttatcccccagcccccagacaggccctggtgtgtgttgttccctttcctgtgtcgacatattctcattgttcaactcctatttataagtgagaacatgcggtgcttggttttctgttcccgtgttagtttgctggggatgatggtttccagcttcatccatgtccctatgaaggacacaatcaccttcctttttatggctgcatagtattccatggtctatatgtaccacattttctttatccagtctatcattgatgggcatttgggttggttccaagtctttgttattgtaaatggtgctgcagtaaacatacgtgtgcatgtgtctttacagtagagtgatttatattcctttgagtatatacccagtaacatgcttttaaaaatgtcttagttttgctatgtgtacaggaggctggagaactagaaggtgcgtggtcttggagaagctctgtagccatcaaggccaccctggggccaggcagggtggctcatgcctgtaatcctagcactttgggaggccgaggcaggtgaattacctgaggtcaggagttcgagacaagcccggccaacatggcgaaaccccatctctactaaaaatacaaaaattagccaggcttggcggcaggtgcctgtaatcccagttactggggaagctgaggcaggagaatctcttgaacccgggaggtggagattgcaggcaagattgtgccattgcattccagcctgcgtgacacagcgagactttgtgtcaaaaaacagacaaacaaacaaataaacccaccctggattctgatgatgggagagagaaagggtgacttgtccaaagtcacattgcagagctggactcagctcccagactcctgggtcctgtcctcaccactccacaataccctctacaacagcacacaggaaggaggactctcacctgttcctcctgcattgtgaagcctaagaaaacagcgatgggatcattgattttgatttggggccagtacctccaaaaatgtggggcagtcctgccttggaaactcgaggggattttaatggtatccagccagcatggtgtccagctagggcctgcttgggcactttctgtcctcccaaagtcagggaaggaggctgtctttggctccagccagcatatcttgaatgtctctgtgacactggctggccaccccttttaatagaaagagaaggacttaggcttcatcaagccttcatactgagctgaaatttaattacatagtttgtttccattatgttctttttaatggttatttcatatttatggtaagtgctattacttttctattcatagtaataatataaaacttcttttaaaaattaaatccatttaagtaaaaaagaatgaatataaattaaataaaaatattaagtaaaagagagtaccaatggctccccgggtgtggtcaagaatgcgagggtgctagaggaaagcttaaggttcaagttgggcagaagttgctttagaggacagagaggagcaggtggaggggacccccacctgctcctctggactcccgggtgggatatgtcttcctcaatgttccaggagctttttacatgaaggtacccattatacataatttacgtgtgttgatcaaatgatgagtgggcgcctctcgctcatttaataactcaccgtggaggctgttggagagacgcccctcgtctccatgcttaacagactctcctgctgctccatgacagctggataggaggcaatattttaagataaaaggattattaaaatagtgcatgtgctgtgttcacactcccatgtgcttcctctttctctgagttgttgtcgagtgccatgtaatttaataaattataacatatttataaataacaccttaggttaatgttgtcatgcatttttcacaacttagcattgtacacagaacgagtgggaaagtcgggggagaaggggtccaaaatgcaaagagaaaggagggtgctcacagcgtcaggtgggagtgggcttcccccctaaagacaacagcttgttcagggtcgctcatgtgcagagggtggcctacgggtccatcaggggctgagggatatgcttggggcctgtggaagagctttggaggctgcggaaatatggggtctggggtgagtctatggggagtccatagggaccactgggggtccttggtggtcagtgtgggtccatatggggagtggtaggagggatcagagtccagatctagactctgcctgaacctcctgcaagcctttcaccccctctctccctctccaacccagggcctcagttttcccacaaggagcttaagcaagaggctcctgtccttattctaggattctagtttcccacaggagacagaaccattagcaggtggctgtattatgtttagatgtctcagacttgtccggggctgtaggagtgtgtgggggcagtgggagtgtgttcagggctacgggggtccatggctttgggaaggggctcagggcagacagtgtccaggcaggctgcctgcagctgaactgaccatctacctcttcatatcctacctgcctggcttttaactgctcaggaaattaaacactgtccatttgaaaaattagagataaaaccataagagagaaaatcaaaagatctgagatgagccaattcctcctcatgcgagacttggctccaagggtcctgggagtgaagacaaaagagaaacttgagactaccactccccacgctctagcacatgtgcagagcactcggcaatcttgtggaaatgtggattgtgattcgggagacctgcgcaggtgtatgagggtggaaccacactttgagaagtgactttggacaatctggtgctcagagcctgcaaaaggaagccagcaaagccacaggcagagatgagctttgcactggagattaagcagctcaaatccatgccctggaccaccaggcacccaggcccaaagggctgattttcacaaaagtttggggctcagacagtgcaaagccaaatggaaagatgccacccaggagggatcatagtccaggtctagactgcctgagcctcctgtaagcttttcaccctctctctccctctcccacccagggcctcggttttcccacgaggagcttaggcaagaggctcctgtcactattctaggattctagtttcccgtaagagatagaaccattagcaggtgactgtattatgtttagatgtctcagacttggtgtgaattgggactcctgtcccaaattaccttcctcgcctccagccaagttgcccgaaatgctatcattagtgcatcattcctttgaggacaaataggcttatcacaaaatgtcactgcacacagggaggtggcaagcccaggcttctccgagtagaccatcttctctcacagccgggtaggggatgagtgaggctgcctggggagagagggctggcttcagaggcacacagtgacttgtcccccaggctgtctccatgagcagggcacacaggaaggctcaggtgagctctgatgtgcaaagataaaggtgtccagctccttcgtggcccagagacaatgttgcttttctaggaaaacccaagtctgagagaagccaagccttgggaaggtggtctcagctgcagcatccgggagtcccatagactgtgggcatgcgttttccaagcagtgtcctcttgtccctaggcagaggttgttctttctcgatagctgttccaagagtgctatcctggggcttcctaaccactccagaccctctgtccagccaccaggtgcagagagggtactgggaataggagacacccaccttgtactcatgaggggccttgactgggtccctggactaggagagctcccttccttcctgggcatccccagagggctgttgggtcgatgttcaacatggagcagagagctccagagatgctcccaggaattaggtatctctggaagccagagcctggaaagccccctctagaacgcacggaccagatgtccctttttgtctatttaatttattttattttatttttgacttttaagttcaggggtacatgtgcaggtttgctacataggtgaacttgtgttgtgggggtttgttgtacggattattttgtcacccagatattaagcctagtacccattagttgtttttcctgatcccttccctcctcccacaccccacccttcaataagctccagtgtgtgttgttctcctctatgtgtccacgtgttctcatcatttagcttccacttataagtgagaacatgcagtgtttggttttctgttcctgtgttactttgctacgaataatggcctccagttccatccatgtccctgcaaaagacatgatctcattctttttatgactgcatagctttccatggtgtatatgtaccacattttctttatccagtctaccatggatgggtatttaggttgattccatgctgtggctattggaccaaaggtttctaagtgggaaatccggggcctcaaagggctgctggatgaactagaagggggattgtgagcccacaacagtgacatgaaatatgtgcacctatgcatttccatcctcgtgacattctcaaaaaggcttttgatgctaaaatatcaaacaataaataaaacaggacaaaacacccttcatttgcagacttgcctagggttcaaggggtaaggctctttggaatgtttttctccaaaccagcttcactcctaaggctcttttttgacatgtaatgtctcagaagagaaaaggcaaatcagtttcttcctgggaaactcaggcttcctgagtgagcaatcaaatccctacgcactgagctagccctcgcattctagctgctgggccctgtccaaaccctggtgaagagggcacctgggactccttcccatagggaaggtctggtccagctttctaggtggccagccaggccacagaatacctttctttgccgctgcggcatctatcccgtggttcaacagtttccttgtgttacaagtcctagggcggccctctcccccccacgcaccgtgccggcatggtctggatgcttgcacacaccgtgcacgtcatttctgccctgtgctgagctgtgcagagagccggaggggaacaatatattaccacgttctttgcctaacaattggtaacacatgacacttgtatttgccccaagataatgtacaaatatgttttacagggtttcctaatgataatcatgatatttcattcttcttgcccttctaataatgataacagtctagcattattattttttttaactgttctcagcgagtgtgacattcagttcagagaatcgaatgtcagcaagaaatctgtatgcactccctgaagctgggagaagccccttccgtttatttttaggttgcaggagaatgaagtgatctcaccttattcttttttttccccccttagaaaggtgtttggcattcagcacctctctgatgtttatgaagtctggtctgaggtgtaggcattctaggtcttttcgaaagctgtcctaatgagaaggtgggggcttgatcaacattgcgtgggggccatggagggagagagttcctcccttagaagaaaagtttctttcaaagtgggctttgtatattgaatgaggaatggcttgggcccctcagcaaaagacccaactaattagtaggtaaagcagccacttcaaggctccttgtagacactaggtagaaacacctaattttttttcccagctacttcactgttcttcagggtgcatttgacatgccaatgtgttttttcatccttgtcctccaccattagggagcgttatcttcagggttaaatacccaacaaatagcatatatatatacactattataataataatagtgtgtgtatacatatacatatatatatatatatatatatacatatacacacactattattaaccagtagcagttctaggcatgctgaaaactacatttgagctgttcaccagaaactatgcataagagatgaagattgatcaaaacctagaaaaagaaaatagagagccagcaatgataaaattaatatgatagaggcttaagttaggatagcatttgttgcctctctcctctaagttcttagttttaaactgatgcttcattgttccaattatctaagctattttgacttattgggtttttttccctctttttcttttctttcttttttttttttttttgtagtggccaaatgaccaaaagtgtcctatttttggccaagaagtggtgagattctagcacacactaagccctttatggctggctggctgacagagcaggaaatggtggcggccataggtaggacattacactgaagccaggcctgggatccgattatttagggaggcaagtatttttgttgatgagcgaaatgaaatcctctgacagcaaaatcaatcttctgcagagaccccagagcattgatcctggtgcacattgacaggctcaggctgtttagccatttggaatgaccacaaaaaatgagcaagttgttaagagttttagagttttggtatttattggcaaccggtgcactcatatgattaatcacacattcgaaatgtgtgtgccatggaaattgactgcaacgcagcagaaacaaagttttcagttatcctcgtataataaattgaagctatatccctaagcagaattgtcttcaagattccaatttgccttgttaaaagtgttgtttatagagtagttagcaaaaacgcaagtaattacgtgcagaattcattctaagcaattctttattttcccccgttctgtattggttttccatcttcattacccagtattttggtccatctcagcagaaacctgactggtgagatggcggccaggacggcggccttgatggctttggccatgcgcagagtgcatgtggtcacaggcatcagtgtgtgggactcgaacaggcggggctccaagactccagctccggggccgtgttgacagggacaaggcaggaacggcttcggtgctatatttcatttcataaaacaatatttacttctggagaagacgcctctttatttatttatttagttcgttttgagcaggagcacagtttggtatacacgtcgcggtggagcaagccacatctgttttggttgcgcaaccagcaggacttcatttcacaaatatcatccgagtcaagaatacagcttttggaatgcaaattatgtttaagtgagtaaacattgcagcgactgtgtacccccctaaacccccccagcataggaggggatagggcagcaggcagtgggtgcaggctgtttgcagagacccccagtcagggtccctgtggagggtgggcagcctggaagggctcccactggggaggggagagaatgagcgcagtgcctagaggggaagcccactccgcaaagccctgcttcccagaggctcctgcttgctctccccggaacagagacctcatccatatctatcaggagaggcctaattatagagctcggagattttaatggcacagggaaatttaaatgcggtggaaaatatgaatattcctaagccagcagtcaaaatacgaaatgattggcttccgaatcaatgaattataatttcacagtgtattctccaaggtggagtctctctcccttcccaggaagagttttgtgcaggcagacgtgttttaataaactgtacttcagtattttgttcagcagaaccttgcctccctccagccccggatgctgcagccttcgtcagtgctcggtccccccaaacagattgcaggggacaacaggaacaatcacagcatcctgggggccagcagggggccagtacctgacaggcacacttgagccgcagccctggcttcccgggtgcctgcaggaagcgtatcagggtgtcaaaagtaggggaccaggatatttgtctaaaacaatctggctcctgctcatgcacccaaatcccccatctcaaagccacaatgcctttgtaactgaagccttttccagctggagcagccagtgggtccccgacgcgggacacacccttctcagcctcaggcactgagtgactcccttcctccggctcctatatctttacctgtggaggagataaggatgtgccccagctgctgtccatgcaaccctcaaactggagagtcatgccataaatcctgttttattttatggacaaataaatgctgaggtaaaatattccaggatcgtcgcttgaatacttgccatagcagcggtactgtaataaccaccgtgacattaatttactgcattgtgccgtgggaagaaggaagaaggagggagaggggcattaaaagagaaaaatgactttccttcgaatttattgggattggcctccctcattttcagccatcattagttgattaggccctgatgacagtgtggacaatcgtgccggaatagttggcggagagacgccctaaaggtactctgttaattgagatgatgttcatcttgtacttactgaacataactgcagaccgtggaattggtggttagtgtggtggaaccaagcaggggggccgggctgtggccagaggccgcgggctggggtgggagcacctgctgctaccccctccccaccagaccacggcatccacccagagccctggtcactccatctctattctgagcactgccgatgaacctgtcaagagaggataaagcaagcttcccttttatcccaggagcgctcctgagctgctgctgcacagagaccaccaggaagatcccccccataatcgccggctttgaggactgactgcagtctgaagggtatcattccgagacccgcaagccagagctgagaccaggctcctcttcttcccagcctcgatgctgtagacagtcattcctaacgggaatacagacgcaacttccatccgcatcaatggctggggcttgtccacaaggagatcccagccggggcagagcgaaggcctctccaccctgggatggagacccagtttcgtgtccacaagctccattggcagcggccttggccgcgtatcccgagcaaggagggtagctccacttcgtgatctttgcttaaacattttcagaggccaacactcgctgtctgtccccagggctagagaattgcctgctaaaggtatttaggaaagaaaatggaatctgacatgtttgagtgatttagtaagggccacataccttccgaggtgcttgacatccattatcccacttaatctcctcctaccctatttatcgtcatttagggtcagggaatcgaagctcagagaaatgagcaggcccagtgccccatggcctgcaggagcctggaacagggaagtaagtaggcaggggaggtctctgcttcctgagagacagtggttgcagaagctctaggatcagactccctgagctggaatctggctgtgcttctctcttgctctgtgatcttggacattgcttcctgtctctcagcctctatttaatcgtttctaaaacaaaaataagtacacaagaccatgatgtgggctcggtatttgtgagtaattttgattgctgtagtcgttgtggttaagggaccatcagcagttatccttcttggaatcccggtacctaggagggggaaggagcacaggattgctccagcctcagtcatgtgaaaagggagtgcctcccacaccctccccacagcccaccacgcctgtcatgtctagacaaccagacagatgctcgggcctgaagggtgacaaatccactcacaagatacagcttgctaagtggcagtggccttttattctctgacatctttccagacccttgaagggattagaactggattagtttgagatgagcctggctctgccgttatcacctgtttataggataatgacattatctagtttggcccgtaagggcctccatacgtaggagcttcgttctctttgatctggagggtcgcagacaacatatctttaaatctaaacaaactcactgaagcccaagataagtgttcaaaatacccagtgagaagaaaggagcctctcttttcccttcctgcccaatgcaaagagcaattttaaaattgtgtgcactcacacgattttaaaacctaaaactcatcctgccactttggaccctagcttccttgcgtctcctttcacgtgtgcacagaattctgaagtttgtagagctttttcaacccatctcaacttatatggtgagcacagccgtctgagcagagcagggtgagctcaatacacatgatacaggctgggacacaaaacacaaggctcagggaagacaaggagtttggcaaccctcatgtcttttttaagagaggagctgtggttaaacccagctcatctggaaaaacccagcactcatttcactgcctgaagccatctatgaaccgacctctctgcccagacagctttctttaaagaggatcctcattacccttcacagaaaacatctgtttagacagatgttccaggaggtccttggcccaagtccactttcttgtcccaaggcttccctaacgtccatcatccctgtttaaaaattatttttattgaagtataatttacatgcaatataggcaatctgctttaagtgtactgaccttttgttaagttttggaaaatgtgtacctttgtggaaatgatgcaggacaggaaagacccaaaactagggcttagcctgggaagtttcttggttttgcccaggaaagaattcaagggggagccggtggtattagacagcagcttctattgaaaaggccatgcacagcagcagagggactgctccttgcaaagcagggccaccctacagactgtgtgcctggacatgcagctcagaggcacctctgcagacatatttatacccacttttaattacatgcaaattaagtggcagattatgcagaaatttctaggaaaagggtggcaacttccaggtcactgggtcattgccatggaaaggggcagggtgttgccatggagtgtggccatggcaatggcaaactgacatggcacaatggtaggcatgtctcaaggaaagctgcttccactccacccctgtttcagctatttctcaatttggtccagtgttcaagcccaacctttggagtcgagtcccacctcctacctcagaaccaccaccataatcaggatttagaatgcatcaccccaaaatgtttcttcatgtccctggccccttgctttcaatctcctacagctcctagtgagtattgatagttcagtcactatagtttttctttttctagaaattcgcctaagtggaattatataatatgtaccagcttctttcttatatctggcttcttttacttggcatgctgtttttgagagttaggcattttgttgtgtgtttgattagtttgatttttgtagtgtgtttgatttgctgtgtgtttttctttatattgcagagtagtattccaccgtatgtatataccataaaatgatttatcgatgctccagttttagacatgcaagtagtttccagcttaaggccattctgaataacgctgctatggacatttaggtacaagtttttgtgttaatatgttctcacttatcttggacaaatatctaggagtgagattttggcccatatgataaatagatatttacattataagaaactttctattttttaaagtggctgtattcctgccagtaatgtttaacattccaattgctccacatcctcaccaacacttggtattgtcagtctttctaattttaccattcttgtgtatgtacagtagtgtcttgttgtggtagtatttgcatttccttagaaactaatgatgttgagcatttgttcatgtccttaattgacattcataatattttctttggtgaaaggccagttcaaatcttttgcccatttagattgattatcttcttatatttgagttgtgccagttccttatatattctgggtgtatctcctttttcagatatttctagcaaatatattctcatagtttgtggcttttcattttcttagacatgtctttcaaagactaaaagttctaattttgataagtcatttattcattttttcttttatggtttgtgttttttgtgtcttatgtaagcaatttttacttaggccaagatcacagggttttcttttctattttcctctagaagtgttaatttttatgtataatgtgagctaagaaatgaggtttatattttccatgtgcatatattgttatttcagcatgttacacctctcaatgtatataagtcttttctattttatctcagtaataatttgtagttttcagaatatgcctctcacattgtttattttattcctattaatatttttcatactattataaaaggtattttaaaactttgctttataaaaatttgttgtacatttttatttttattccttttttaatttttaattttgtgggtacataataggtgtgtttatttatggagtacatgagatattttgatataggcatgcagtttgtaataatcacgtcacagaaaatggggtatccattccctcaagtatttatcctttgtgttacaaacaacccacttatactcttttagttatttttaaatgtagaatcaaattattatttactgtagtcacactgttgtgctatcaaatactaggtctttttcattgtttctgactaattttttacacattaatgatccccactctcccatgttgtatatttttatgtctagtccatatattctgtttcattgctaaattgacttattaattctatcttattttatagatttcttggatttcctccatagattatcgtattatctgtatgtcttttatttgtttttcttgacttactgtcctatatgggacctccactgtaaattttaatcaaagtggtgaaagcagacttccttgcctttttcccagtcgtaggggaagatttaatctttcatcattaaataggaacttagctgtaggtttgtcatagatactcttaatctagttgaagaagttctctatattcttagtttgctaacagtttttattcatgaattgctgctcaattttgtccaatgctttttcagtatctatgattgcaattagttcctgctatgctatttaaaatcttgcaagaaaaacctcagtgcttatggaaaaattggggtgacaggcaccacactaaaaacctttatcagtgacacacacaagaaaagaaaagatgagaacctaataaaaatggtaccactgttttccacatattactacatagctgatttcagctcagtgcagttttttgcattcatctagttttccttgatagcaaaattgtgcataagcaaacacaaagttcaaattgttcttaacacgtgaattgcattgaaacaaattcacatttcaaaacaagtgttacagcagaatttattgtaaaagtttgtgttttttagtttattaataaggtaaattgcaatgattaacttttgaatgttaaactagtctgccatttgttggataagcccatttagtcatgatatattattatatttgtatttttctggatttaatttgttaaaatttgttaggggtttttggatgaatatttataaggcgtgttaatgtgtagttctgttttatagtaatgtcttcttgttattttcatatcagattaaggctggctgtgtaaaatgattgaggatatatttcttctcctatagtttctggagcgtttgtatagaactggtattgtttattctataaataaacaatagaattcatcattcaagtaaactaggcctgagattttctttgtcaaaagttttcaaatgatgaattccatttctttaatagataaaagcctattccggttatttgctccttcttaagtatgcttcgataatttgtatctctcaagaaatttgacaatttcttacaagttattgaatttactgacacgaagttatttctcatatctccttattatcctttcaaggtctgtgggatatgaagtgatgtctgttctttaactcctaatattggtaattgctgtgttcctttttccccttcttttttattatttagtctttttaaattttcttcatttattgatactttgaagaaccaaattttgtttccatagatttactcaattatctgttttctattttattaatgtccagtctttataatgttctttctttctgctcactttgggtttcagttgctcttcgttttctagtttcttcaagtaaaaattcaatcattgagtttagttttttcttcttttctaatgtaagcttttaaatataacaaatttccttaattatcactttatctacaacccacacattttgattttttaaaattcagttcatactatttccaggccataatgttgttttatttttcctgtgatttcttttttcactcatggatttttagaagtatgtttttaaatttcaaatgtttgtggtttttccagatacctttctgttattgatttctaggttatttccagtatggtcagagaatatacttcttatttttcaattttttaaaaatttatttaaacttattttatgacctagaatatgagctaccttagtgaatgacccatatagacttgaaaaaatgtgcattctactcttttaggattttctctaaatgtccctaaatgtcactcagttttggttgattgacagtggtgttctggggaacgtttaactgaatatctggaaagaaaaagtcctgatacatagtatttgataccttctgtggatatgcattcttatcaatgctgattttaagctaacaatgtgctgtcaccacattgtgctgtcacaaatgaaattgctttcactagccagtgcaagctagttctagcacaccacagtgattgtggtattcaaatcttctgtatctttgttgcattttgtctgtatattctttcagttactgagagatgaatgttgtaatcttgaacaatgatcactgatttttccatttctcttttcagttctttcagtttttgttttaatgtaatttaaagctttatgaagtgtacatgcatttagcatttacgtgtgttataacttcttgataaattgatccctttatccttatgaaatgtacttcattatcactggtaactttcttttctttgaaatatatttctctgatactaatatagctacccccaccttacctttgattagtgtttatatggtgtagaatttttcattcttttacttaaaattttttgaataattttggatttacagaggaatgcaaagatagtactgagattctctgcataactgtcactcatctgtccctaatgttaacatcttaaacaactatggcagatttgtcaacattaagaaattaacattggtgcattattaggaactaaagcacattttttacctggatttccccaggtttgctactagtttcctttcatgttccaggagtctatccaagagtccacatttgtatttcgttattgtgtcaccttagtctcctctggtccatgaagatttctcagtctttttattgtttgtcattgcctttatgcatctaaaatgtactagccaggtattttgtagactgtttctcaattcgggtttgtctgacatattctcatgtttatactgggattatagaatgtgaagtgtcctcattacatcttttaggggcagaaatgataaaaatgacactattactgatgttaactttgatcatttggttaagtctgccaggtctcttcactgtaaagttactatttttttttccatactgtattcattgaaagtgagtcaccaagttcccagaattaaagaattaagttatacttcctagaggggagagagtatttatatgtaaagttatagagttataggtatgtgtgtgtatatacacatacacatacacatacacacacacacacctataattttatatttaaatatacatatataaatatatatactgtacatgtatatacacataatgtttattgtataaaattattcaaacatttgtcccttttcccaaccccttgcttatttgtaatttctttctctaacagtgagaaacttggcttcctttatttataaattactagtttttatatgtaaagtagttttataattgctaaatatatccctgtgagaaacacatttactacctaaggtactgtgtttatatatagttttttttgttgttgtttttatttaggtcagcccctttttttcttcatcccagtggtgatattttgtcatattttaataaagttagattcatttgtcaaggtctacattccatcctgggatctttcaatatcctggttgacttcttaaagaatatcacatactgtaaagttttctttgtagtgtacagttatgttgattttgagataaaaaagcagtaccatctatctaccacccaagaaccatacagaatagcttcatccattctaaacattttcttctctgtcttgttatagtcaacacctccccactccctaacccctggcaatccctgatacgttttctgtacccataattttgtcttttctataatattatataaatagaatcagaaaataagtaaactttgtgtctgacttctttcatttagcaaaatgcacttaagatttattcattttgtgtaaagcaatagcccatttctttttattgctgagtagggttattccattggatagctatactacagtttgtttattcacttatctgttgaagaacatgtcggcattctttttcttttgtcctctctgtgccgtgtatttaaagtgcatttcttttagacaagtcgtgtttttatatccaagctgactttttttaatcaaaatatttagaccatttacatttagtgtaatttttaatatgattaagtttatcatcttgctatttgttttttaattttcccatttgttctttttatctgtcttcttttggattagttattttttaactacattttatttccactaccattttgtattttagttttctaaagtttacaacatgtattttttaacttaccaatttactttcaaataatatcatgccacttaacatactttataagaatcttagaacagtatacttgcatatctttccttactttttgcaattgttcttatatgtttaattacttttattattaacttttaatgtgaagttccaaactaagaaaatggcctctaaccataaagaacaggatcaaatcctggctttcttactcactcactatgtaatcttaggcaaatcactttacatgtttgttcctcagtgtcatggtaaagttgtctgtaaaataacaagcttgatatgaagaaaaagtaaaataagccatgacatagttgccacaccatagctggcacacatgaagcaaagggatacagtatcccttctaggccaaacaccagaaaaagtttgtcgggagtggagagctaaaagtgaacagtttcccatctctgagcacactcattccttgctactcatagtctggccctctgtgacaccaggaaacaacagcagatgccaaaatgaaccacagcagcaaactaagggtgcccatctgtgtcaacaccagcagacataactgattctattccaagaaggaaattaaactaaaaatcagttgtactttatgtgagctccccaaatcacaaagactaggttactaaggaaacttgcttctgcaaacttcaagtgttgaacttaagtggtgagtggttttgtctgcagacaccatgtaggatgcctgctggagattgggggcttcagagctaccttattttcttacttcctggcccagctggctgcctcttctcctgagctgctagctttcttctggagggatggataggctaacgcacttgtgaagtaagctctgggttcagacacacctggatgtaaatcatggcccataattcattaatcataaccctgcagaagccacttagccccaccaaccctcagtttcctaatctataaaatgggaataaaaatgaaacttaatgagataatgcattttagctaagaagagtagtgggataatattctaaaatattagccaatcttccctgctcttcctctctttcatttatccctcagttcattttgttctatctcttaggccctgggcagaatagagcagcagaaagcaggcaaagaaaggagtcttttctgactgtagatttccagaagcctaggccctagggcaggggcaagtctcagaggacagattcaggagagagagatgatgatgaagggccaggagtgtgggctgtcagattggaaaccagtctgagttaaatctgggaggaatgaaggaagggaaacagaagggtgagggctttgtttccaggccaagtgcaaagaggcagcacagccccaatcagttttgtgggatccaccaaatggctgtagaaggaaagggagagaagaaagggcccaattgcctgggccagcctctgagttacactggctgggtagtatgtccatgcacacaggctccaggtcagagggaagcccaggatgaggcaggacccacagagtggcctctccacacccaggagttcagaatgccaagcttgatggagcttgtgggcaggaccaaaacctccttggaggtgacctgcatggacaaacctccaaggaccagaagaagggtgcacaatttagcagagatgtcatcagagaagggagggtgggatgcgaaaatttctctctgctcttctccctctacaactgcattttgctgaatttgtgcaggttaaataagcttatttcacaatgtgacttgacagtaataataacacaatcatgtcacacaaccaaggcctcagtttttggcagggatttaagctgtccagagctttgttgtgatcatgggtgcatttaacattcccgacaatctgccaggcaccagggcctggctatgagggaaggaactcctacaactcagagtccctctccttcactcagcatcctcaccagacctcgtggaaggaagaaatcctctttaaaagcagtgatattcatgcttcagcatttactgagcacctgctgtatattgggaccaggaagagaccctgccctcatgaggctgtcagtccagagcagtagatgtacattaatcagttaaaggcgaaagtaccctcacagtgactagtttctaatgagcaaacagaacttgtggaaggctggcttccccccatggcctcttataagtgtttaaaatcaatcaatcaatcagttaattagtagctgttcactgagtccagcctggtagtccagggctcccctggcccaagtggtctctatggaaggtgcagacacagaggccccatgcagatgccataacagatgtgagagcatttggcaaacaagaaacttccatcagacatgacaatttctgctatgatgcttattgttattactgcagtcattgttgctatcaccgtcattaatacaagcagtgcttgtttgaaggagatggcctgattggaaaacaggaccaggcttgcacgcaggatcagggtgtctgcagggagcaatgagctcaggacggagccgcagccttcacttgatttctcgccgttcctgggtctcttcttaccacatccaccatgtctctgggccctttaccgctcactaattatattttcattacatccacttaccccttttacagaaccaagtgtgttttttttgttagttttttgtgctgagacaggatcttactctgtcgcccaggctggagtgcagtgacgccatcatagctcactgcagcctcgaattcctgggctcaagcgatcttccagcctcagcctcccaaagcactgggattacaggcctgaggtaccatgctggacctgtgtcgttaaaagaaacattctacaattatcaccaatgggaagcccctattattagacatagataggaaacaacagttcaataaatacaatgattaaacattatttgtaaattgtagctaaattcagccccatgccccagctctgaggtaggtatcacttaacagaaagcctcaggatggaatgaaaaatgtagaggggtaattttctcatcatggaatccacgtcatttgctactttgtgcctcagctttaagtctctggccagccattttctcctgttgtgtgcaagttgatctaaaaatccccacccaggccccatcccacattcctgcttcctgccctcagggcaccttgcttggctgctgttgaatcagccttctctcctttctgttttttttaaattaaaatagaatttgtttatttttattgatatataataattatacatatttatgaggtacttgtgatactctaatacaggcatacaatgtgtaatgatcaaatcagggtaattagcataaccatcaccttgaatctttatcatttctttgtgttaggaacattgctaatcttttcttctagctattttgaaatacacaatatattcttgttaacaacagtcaccctactgtgctatcaaatgctagaacttatttcttctaaccgtatgtttgtacccatttaccgacctctcttcattgccctgcccacagcccccacacccttcccagcctctggtaactatcattctaccctctactgccatgcaatcaactttttagctcccacatgtgagtgagaacatgtgatatttgtctttctgtacctggcttatttcactcaacataatgacctccagttccatccatgttgcagcaaaggacagaatttcattatttttactggctgaatagtattcctttacccattcattcatgagtggacacttaggttgatttcatgtttttgcaattgtgaatagtgctgcagtgaatatgggggtgtaggtatccctttgccatactcatattctttcctttggatagatactgagtagaatgattttatctcctttagtgccttacccctgttccatagagtcacctcccaaataggccacctccacataaccctgggctccagctcagctttcaggaaaatgtaggataaagcatggtatctttctagcccctaaaactgccttgtgaaccccaaagacatgagtcctataacactagctccattacctgttaactgtgaaacctggaacaggtcagttagtgtttctgagcctgcttgcttgcatgaaatactggtaactgtgcttaccttacaaattaataggaagactaaatgagcagacagcatacagcaacagttttaggagaaggcagtggttaggctgggcatggtggttcatgcctgtaatcccagcactttgggaggctgaggcgggtgtatcacgtgaggtcaagagttcgagatcaacttgaccaacatcgagatcccatctctactaaaaatatgaaaattagccggtcgtggtggtgcatgcctgaggttccagctactcaggagactgaggcatgagaattgcttgaactcaggaggcagaggttgcagtgagcagagatcacaacactgcacgccagcctaaaggcctgaaggacagcgcaagactctatctcaggaaaaaaaaaaaaaaaacaaaacagtggcacactcaaggagcccacccaggtgcctggagactggcttttggcctgcaggtggtggtgaggcagtgcaagtgtgacagctgctgacaatgagatactacctgcttttgcagaacacacagatctatagcccagtgtcagccatgggccggtgctcacctggcgtttgttgtggtgctggcccagctgtccgcattgttggggatgttagagtggccccttctgggtggaaagtcgaggtccgggaggtctctatgtagctgtcctctgtctgataaaggatccttggggctgtctgtctggccactccggaaaccatgggccattgcagctactagctcagccctgatggggagccccgcagatggggcttgagtccttccacttactcttctctttctctgcctcatctattaccactccctgctggcctcctctcttacctgcagccctcctgtgcatccagctggaggtctggccacaccaacagctgacctggttccctagactttccagcccatgtcttggacatgcagttcccaccctccacttctctgcaaattcatcgtcttccttctgagactcctgtccctcagatctcctgcagagacctcaccttgccatctgatgactctgggatgcacctcccccctcagcctgtggattcctagagggcagcacctagtctctgttaactgccccctcaagcccagatgctgtgaacaggagtcagcattggctgtgtacctggctgcctctctgccccctgccctcaactacctcgtcccactctgccctgggggtggcttcagatgagtgaagctcagctctggacatactggacagattgctgttccccaactgtgtcagacccattgctgccctttgcacagtcattagctctaataattactgcaggtcctcaaacacttgtcattcaggtctcagttcacatgtcacctctttagagaacttccccgactacccattgtaaggttccactccctccgtctgaaatgatctgatgtgttttcttagtaatgcacgctctgcctccactctagagcatgatgactaaaatcctgcttatcctgttccccctctacccccaggttgctggcacagggcctggcccataggaagtatctacatgtattgaatgaatgaatgaatgaatgaatgaatatataaaccaatcaatgaaaaaacaaaccaatcctaccaaaagcctcaagacagacacaggtgggaggactgggtaggcattaccgtctccagtaacagatgaggcactagagtcaaagagggctcgcgagtgagagtgacagcctggagccagcaacactgctgtttttcccctgggctccttctctgacccacctctacccaccagtgaacccccgctggacatctggaaagggcatcttctccatccctgacatcactttggtcagaactgcgctggcctcactttctgattcataattcagcaccagcagctcactgctccagtcaggggtgaagcctcccattcattcaagatgtttcagaacgcctgctgcattaccccagaggcagcacagggcttggtacaaaggtggatgcatcacaggccctgcatccccggtattgatttctatatgtatgtcccgcttattagaccgccagaatttatcaggcagagaccaggtcattatttcagaatttctttctatttccccctttccctaaaatctgagggtggggtgcttctggaaaaacaatgcgggattataggtagacttttctacaaaataaacatgatggcatgaaagtactaaaggaaccaagatgacatcttcagaatggttattttcagaaaataattcattcaagaattgataaatagccctagtgtgatagagtgtttgggggtgttttttgtttgtctgttggggggcagttattatgaattgtcttttattttaaaaaatagtgtcaaatactatattataattagatagcaatttttacagttttattgaaatataaaggatacacaaaaaacagcacatttaaaaaatcttttactttaagttctgggatacacgtgctgaacgtgcaggtttgttacatgggtatacatgtgccatggtggtttgctgcacctatcaacgcgtcatctaggttttaagcccggcatgcattaggaaattgtcctaatgctctccctcctctttccctcaacctcctgacaggcccctgtgtgtgatgttcccctctctgtgtccatgtttaatgtgtacaatttgatgagtttgaaatatgaaaacacctgtgataccatccccaaaatcaaggtagtaggtacacttaacatctcctggagttgccatgatgcttttttctttatggtaagaactctttgcttgtttgtttgttttgagacagaatctcgctctgttgcccaggttggagcgcagtggcatgatctcaactcactgcagcctctgtctcctagactcaagccatcctcccactccagcttcctgattagctgggactacaggcatgagcccccatgcccagctaattttttttttgtagcttttgtagagacagtgtctcaccaagttgcccaagctggtctcaaactcctggggtcaaatgattcatccgccctggcctcccacagtgctgggattacaacatgagctactgtgcctgacctgtgataagaatccttaacatgaatgagatccaccctcttaacaaattttgagtgaacaacattgttaaccataggcactatgttgtacagcaaatctctataatgtactcatgtagcataaccaaaattttatacccactgatttttttaaatatggtgaatagacaactattttctctttactccaaacccagagcttctaagttggggctcttaaccttgggattgaacctgacctgcaatctatgctgggatccacaaaaatgcttttttgtttgtttgtttgtttgtttttgttttttttgttttgttttgttttttgttttgaaaaaggtctcactctatggcccaggctggagtgcggtggcacgatctcagctcactgcaacctctacctctcgggttcaagtgattctcctgcctcagcttccagaatagctgggattctaggcatgcatcaccactccaggctaatttttgtatttttagtagagacagggtttcaccatgttggccaggctggtctcgaattcctgacctcaagtgatctgcctgccttggcctcccaaagtgctgggattacaggtgagagccaccgtgccctgtccgaaaaatgctctttctattgctgctgggggggtaataatactgctttccaaagagctctacagtttgcaacaagtcccctcctggctgtggcatgagaggtacttcctgagggagagagaatgcatgtgatgagcggatcacactacagtgtgtgacttgctcactgattccagcattcggtttgggctaaactgtgttctttccattatcttggtttaaaaatataggttttttttttcattttttaaaaaatcaggattttatacatacctggaaaattaggaagtgggaccatactgggcctatagttctccaacaagagctgagccatgctctccccagcagatgggctcctagatcctgtctgctctggtcctcacctggcctgctttgctctttaggcctctttgtctgtgaccctggtttataagaaccatgcttcccaaccttcccccctaaataccctagaccacagatcacccctccacagtcaagcagctctgggaatagtcaaggttcctgcataagcacattattttgaaggcttaggtttcatcttgaaaaaaatgtgtgttccattttattatataacagggctatgtatattttaattaaaatttatatgtttttcttcccaatgtatggactaaaagtgtccctccaggaagatgtgccaggctgttctgaggctctgagtgttccaaaggtgttagctcagggtgccttctctccagtttgaaaaatacagtctctcccagtattgttgctcatcatgtctttagttcctttttaaaatcttccaagttcttaacttttgggcactttttaaaatcagaaattaaatgcccttaatttgggggagttgatatggccctcagagctacaagcccctttgggctggccccagtgcttgtgtggggaaggggccaggccccatgtccacatgcggcctggctggctcgtgcgtggagctcctgggcatcacacactcagcttgcatagcgctgccctcagaaacttttgcgggttatggcttatgaagggttccggagagttcagacgcaaatcgatagcatgcattacaagagagcgtgagctaacaaaggtgctgggggaccatgcatcttaaaacagcttcttggggactttaattgtcgggatgttcaggagaagaatatgaccttacggggcattttccagaatagaatagtctatatattaaaaggcagcaaatgattcataactggttagtggcggggcctatgggtccatgtttcccatgtgaatttttttttctgcgttgcaaactcttacattaaattgtgataaatgaagagtgggggctactcatacaaatcaatgactctagtgtgtgtgtcattagcctgagagatgcaggcagcggtcagtcccataaatcatgtgatgatctgctgtctgcaacacgatgcaagcaagcaggcacattagggaggttaaggaatgaaattaatctgtgcattttcctctccccctgcctccttccccatcacctggtcatacggaaagaattaaaatcacatgatccgaactaaaccagctccagaacagtaaattggttaagtttgacttcacctttcaactctgagttaattatgtattaggggattaatttattcacaggcactgggaagggaaatggagaatgggagaaacctgccagggcctctcatccagatgccaaagttattaattgctctggctgtgccacaggctacctggacagaccctggggtggggggctatgtgatcggccatggatatggtggggtctgtcctgctctgaggatcagccagcttgggttacagaagaggccccagtctgtgctccacagggatgcttgtgatgcttggttgctggagtatcttggaagcctacgctagaaggagcctttccccagggtgtgtagccagattacacttcagatggtaactgatacctcttccaaggccattcgccttgcctggaattcctccagtgagaggcagctctccatttgcgaaactacccattttacacatgcaactctgatttgcacaactcaagggtcctactccacccccttgggatcatatggaataccaggactacgtctcccacgcatacatgatgccctctgttcacccgaggacagggagcatgttctcctcaaacatcctccagggtgcctctccaatggcagcctttggaggcctcttgcctttgtggtcttcctgggaggtcagtcttgatctctcttctgtggtgtggtcccagccgagtgagaacagctgcaggtgcagcagtacccaggggctcctggagatgagacctggagcagataggggagctcctttctcagtgatgctacctggtggtgattgggcatcagatccagcaggaaaccccaggaaactcctgcctatttaagggtctgaccacaccagaaacagcctctcaaaagactccaaacgctagcatcatctgcatggagccatgcaagagaaattgttaggtatatttgtccatttgttgttaagacagaaggatgctgaatggatttgacacagaccctttgcttataaaaactcacaacaaccaacatgaatggcagcattaatgctctgtgcgtgaacagcacttcacaatgttctaaatgcgttcccatgtgtttgggatattgtttaatcttcccagcagtccatgagttgggtccaatgattcccatttgactccctaaggaaactgaggctctgagagtttaaaagacttggctgagttcacatgcctgggaagtggctcagccaccataagattcagttgcaggaaggatgggaccatctagggtctttcttcctatcaaatctacagatggaaagttctcagagtccaagcacccatgaccatctctagaggctctatgcagctcccagatccgtgtgctgctccaatagggttacaaaaacaagttgagctaacatctaaaaattaaaagctttcatagaaagaagggattttggcttctcttgaaaacttggaatctggccattgggctgacatttcactgtggtgatactgggttcatgatgagtggtggctccactcaaagggctctgagctctcacaggctcaagagacatgttttgggcagtacacacactgagacactgaccccccaaatcctcactctgtgcaatgacctaatggccctcctctcaccctcccataacccagtcttactgctgcccccacctcctggggaacccacgcatctctgtcctgcccatacactttctctctctgtccaagcccttcttggcttcaagtcaagctctggtcatttcactggctcctctgccagccttctccttcctaagctccaaaaggatttttcagctggttgatgcgggtgagcacgccagagccagatgcaccctggagacatctaaatccaaccttcttgtctgtagtaatgaaattaaggtgagacaggttgcctgaccttctatgtcgccaaccccattcccagaccctctcctggccccaagaagccaccctgatcatgttgctatctgaatgttcaccttggttgctcttttggggaaaaaataccaaaaacacagagaaaagggaaatatcaaaatccgcagcattcagaattaaccaaaaatcaaaatttgccatatttgttgcagaagtttaaaaaaaaatcaagaaattctgagttccatccaggaagctggcttcattatactcttaaggtctccacacatctcttcctgatccccttccattctcttcttccagaaggaagcattattgtgacttttcctccaaatccttctaatctatgtttacacacacacacacacacacacgcacacacgtttgtaaattacatatgttttttggttacatgcatgtgtttagatctacataaaacacttctgcttttttccatcaccattgcattttttaggtttttacggtttggctctgtccacccactccaaatcttatcttgaattgcagttcctgtaatccccacatgtcatgggtgagacctggtgggaggtaattgaatcatgggggcgggtttttcctgtcctattctcatgatagtaagtctcacgagatctgatggttttataaaggggagttcccctgcacacactgtcttgcctgccaccatgtaagatgtgcctttgctcctccttcaccttccaccatgattgtgaggcctccccagccacgtggaactgttagtccattaaacctctttcctttataaattacccagcctcgggtacgtctttattggcagcatgaaaatgaactaatacagaggtcgactcccaccctcacctgtaaatccagcctggccaaatcccatcctctgagggatgtaggattttgtttcccagatcccctttataattacttaattaatattttttagacagagtctcactctgttgcccaggctggagtgcaatggcatgatctcggctcactgtaacctccgcctcccagattcaagcgattcttccacctcagcctcccgaggagctgggactacaggcatgcacaaccacgcccagctaatttttgtatttttagtagaggcagggttcaccatattggccaggctggtctcgaactcctgacctcgtgatccacccaccttggcctcccaaagttctgggattacaggcatgagccaccgtgcccggcccccctgatccctttttgatgggcatgtgcattgtggattttttactatcaccaatgaagctggaacaaaactctgcatcttttctggggtttgctaatgaggtctgcctagagttttatttactctctaaatgtgtcatgggtccctctccccagtgggactgagaccttctgggggaccctagggaccacatgtgaagatacccagcacagcccccagttggtccctcagtattttccctggcatgtgtagtcgcatctctcccttagctctccactgaggctgcacgtgctggtcacacagccctccagctggctatgtccccacatgtaagccccagggagccccagcctacggcctgtgcgtctcaggcccattaaacctctcactttgtatttcctaattcctttaagaaatcccaaacctgtctccttggatagaaataaaataaatgtaatatctattgctatcgcttaaatacaaattatagtattttttattaaatactctcttgtcaaatgcttgacattcctcataatagataaaaaaacaactaaaactagttattttctgttaccttagaggcttgcaacgtagtttgtattgtatttacttgttatgttctgcttgtcgcatttcattataagcacgtgaattattttccctactaaattaaaaggcaatatccccgcccccagctacccttgagcttgtataaaaggtgaagatctggagctatgggctctgggaagccacctggtgatcagggtcacagatcctctgccagctcacagtcctcctctggcataggctggcccagcccccgtgcctggtaatggggtcaggggaaccaccccaataaactttgtggtggggaaaggctacatgtatcattgctctagccttacactcttttcttcccactgtttcttatcgtcatcatagcatccctataaggcagcaggttgggactactgtacccattttacagatgaggcaacaatcctgaaaggaacttttgagttatggtcaggcttagggctagagccctgcagattccatcgcttccaccagcactgttgccacacacatgtgccaactggaggttaccgtgcaccaggcgcttggggaatcttttcacgtgcaatgccttctttgatcctaacattagttccttgaggtagaagtactgttatctctcttttatagtgttgatgaaactgcagctcatggaggacaaagaagtgcctctggttgtataagtttcacatgcaagagcagaggttggagccaggtctgtctgactttagagcccagttcagaagcagtgagaagaaacatcttcagctctttggggtcaccatctcttttaagaatggggtgaaatctgtgccctgacctccttccctcagggagtgcctatttctcacatcactggcattttacctatcattttgtgagctgctgggactagctggggctcatgtctggacccacacaagtcctgtgatccaggtcagaaactccctcatgagagcttggaatcagatgcttttgttgtgtacacagcctaaatcaattgcaacctcaccaaatgctctgtctcctgccctcctttcctgcataagctctttctggtagcttagattttccagactcagaatttgaaatgggttccagtggaacttgggagagtggagtttcttacagtgctgggatttgacctatttttctctgagcccatggggacttggagagtaatgagcctgtgcacccctgtcagatcctcctgctctttcagtgctaccctccctcccgtcatggcacttctttgaaagaggagttgatacctgagtagtaattcatggtgcagatgcaccgcgttttccttacccactcgtccactgaggagcagttaggttgggtccacatctttgccatcgtgaattgcgctgcaatcaacatacacctgcaggtgtcttatttataaaatgattgcttttcctttcggtagacgcccagtatgggatggctggatcaaatggtaactctacttttagttctttgagaaatctccatactgttttcccatagaagctgtactagtttacattcccatcagcagtgtctgagcgattccttttcaccacatccacccacacatctttttttttttttttccttttaaaacatggccattctgactagggtaaagtgttatctcattatggttctaacttgcatttccctgatgactagcaatgttgaacatgttttcatctttgttgccatttgtatatcatcttttgagaaatgtctactcatgtcgttcactcacttcataatggaattatttgtttttctcttgctgatttgtttgaactccttgttgattctagatattgatccttttttgggtgtacagttccttcagatcacctgcaagcctggcaggttctccagccaagagcccagacaggcttggtacctggcagaaagtcatgaaagctcagttttcacatctgtaaaatgcagaaccctttccgggtacttccatgtcaatgagagaactctgactcctttatttctaaggaccacataccttactatttctcctctccctacacatttagacagtgggcctctggtttgaactgttcttgctgcttaatcttacagagaacgttctcaggattccccctatcttgatgtgtctctctgcatcagccactccatcacctgaaagctttgtagtaacacagcacctctcagctgaggcttgcttctcttacacaagtgcttcccagcatgcactgataacactcggccacacagggagagaggagctgataagtccacatgcacatcagaaaatgatgccttttaaatgcaacagccaccttattctggaggtaaatcacagcactgaaaaatatctacaggtacctatggaggaggaagataaaagaaaaaatacctttttttggatggaaaataagaagccaagaagaataaggttttcatgcatggactatgtcaaggtcccacgattgccaccaagaccaccatgatggaagcatcttcttcattggccaatggacatcagtgcaaggatggtcgtgcatggaaaagaggaggcagaagggcgggagggacttggtcagccttcagagtgagcagactctaaactggacttctacctggcccatcagatcatactgctcatgcagtctgtttgggttttgtttcctctggggacctctttcactcccacaaatatcctacaacccttgagtaggaattaaaacccatcagagatcgaaatagaattggttatggtaaaagggagctgaaacagtgagaaagggaggagaagggaagaaagattaaggcagacaagggaacctgtggagagagtgagagctagagacagaaggagagaagaggcagggccgtggaaacagacacaccatctctccaagtccttctcaaagacactggaagagttctggaaaccgaacaggtatggaacacggcaagtagtggaatggagagctcagcccattttctggatttttagggccccagatcacacatcctggaatttctcatgttgttctctttatctttgttacccatccccgacctagattttcagcctgcaaaggcactcttgctttcatcaaaaccagaattcccactgtgtttttgtcaagcacccttgccttcctcctgggattctcatctgccttttgtttcaattctgtatctgtctgccctgtcttcttcttcttcttcttcttctttttttttttttgtctcactctgtcacataggccagagtacagtggcatgatttcagctcactgcaacctccgcttcctgggttcaaacaatcctcgtgcctcagcttcccaagtagctgggattataggcatgcgccaccatgcccagctaatttttttatttttggtagagatggggtttcaccatgttggtcaggctggtctccaactcctggcctcaagtgatccacctccctcggcctcccaaactgctggaattacaggtgtgagccactgcacccgaccaaccctgtcttcttctttaggtcagaattatcttgttgccttcacagaccacagctggtcagctgcttcttccaccactctgacgcaactcaactcagtccatcgtctccaccccatacaaggaaccccagttggccagcaaggtctccctgacaggggaagcatttctctaagctcagaggggttgacaaagtggaaactgcccactctggaggtggcttcttctccccaaggccagcacagaattctcctgggctgtggcattctcttggagagcatcttgatgcagatgaagggtgctatataaatcaatggatcataagtctgttggacagcacttatataggtaaatgcatgtatgttattcactcagtgaaccttcctaaaaaagataatatgctcaatatctcaccgtgctgacatatttcaactcaattgataatgggtcaggattgagcaaggcttacagagtgaattaccttttagccatcccttccagtttagggttgcagtcaccaacaaaatcaatgtcgaaggattcttgttgtctcaggcaataccaacagtgactcctaatgaaataaaccattgaaaccttttaatcagaccacctgcctaaaaggaggaagccatccagcggaggctggggctctagggatctattttccccttaccggtcaacgcatgagtgattctttaattgtagtaatgatgtgcttaccctggacccagacacttgggcagcaagaggcagcaattctctggggcagagggttggcgtgacctcagctggggctgcacaggtccccgagcagggctgcatcaccaggggccatgcaaatgcctccaggttaggggcctgtttgactcccagacatgtgataaatctaaatctctattgaaagaaagccctgcaataaatgagccctgctctacatctgaattctagagtcactgttacaaaaataggagctggctgcaaatgtgaccatcaatgggctcctgcctctaccccttgctcttccctcctccctgacctgcaaatttctgaaaaattagctaacatcaccttaaatatatttaaatattaggaagccaaagggagtccaaaaacaccagaattgacctagaagctctctgcaaggctctcttttgtgtccactgattcactctgaggcacatttatggtttccttcttctttatggatcattcctggattttctttggaaattcttctttccctcatgctcctgtctgagtgtgctcttctcttagctctgtggtggacctaggattcaggtctgtattagtctgttttgcattactataaaaaatatctgaggctgggtagtttacaaagaaaagaggtttattcggctcatggttctgcaggctgtacaagcatggcaccatgaattttttatggagaggcctctagaagcttttactcatggcagaaggtggagggggcaggcatgtcacatggcaagagggagcaagagacatgccaggctcttttaaacaaccagctcccacgtgaactaatagagtgaggactcactcattaccatggggagggcaccaagccattgatgagggatccacgcccatgacccaaatatctcccatcaggccccacctccaacactggggatcacatttcagcatgagatgaagaggggacaaaacattctaatgatatcaaggtctaacttagtcagtagttgattccctaatgaatctcatcctgtcaaccagagtgtcaactcaggacttctaatggggtgactaacagagaaaggcctggttctctctttccaatcagacatggacctgtggagtgtgtttctggttggtcattagctggtgaaaagcccatctgaaaatgtgacccacaccaaggaagttgagataagaggctaaggcagtgattccaagcctcaggattcctacctgaagttctgacccccaagcaagatcttcttggattatttggtttgtgagtcaagaagttccctcttcactctggccacttaggcttcttaggcttggttttatctccctccttgtcctcttcctccctcctcctccttctctttctccttcatctcttcttcttcttcttcctcctccctcctccttcttctctttctccttcatctcttcttcctcctcctccttcttcttcctcttcttctctttcttttcctcctacttttcctctctctctcactctctctctttctctctctctctgttgtcacaggcaatcaaagaatcctaatggatttcacccacctacaaggaaaaacccatgagcattgggaaataaggcttctttacatctgaggaagaagcccttcctgggaatccactgaggaagggctcctgtgctcctgtgaccacagcaccaatccatgaggctactggtttgagtactaaccaataaatttacaaagagccttttaaaaagccctaagaaagaattgagggcacagatgggaagggaactgcctttcttggtaaacaaattaaaagaagagccactatctgtctagctggtcatactcagaggcacatgatcccttgaagtcccatttttctgattgatgatgatggctacagagaggagctcctgctatggataactttgttgaatccccaatgtgtctagaatggccaagaatgagtctctcagcagccagcaccccttaacacttcccatgaaagatctttcgggtccctagaaaagatccgttcatacgctggatagctggatcagtggagatgacaaataaggtgatcaggcatgccagtaagttggaagaaaccaaagtcaaaccaacagagtatgagttctcctttcccttgggtctatgtggaagcttcctagatgtctgagcacccagaccccaataacttcctctcacccccagccctcttttggggccagtgccatgggaccagttagtgcaatggaggtccagcattctgcaggatccttgagtaggaagctggtggagcacccaccgccctttgtctaccacggtgatgaatggttgttgacaaggctaaacaaaggtattattagtagattacatctgagaggctggactcatgcagaaacagggcagcaagagccctgggccctgctcagcccccaattagtccacaaaagcctaaaccaccaggtcagggataaaagtgaataaatgtttctaaattcttatcttaaacacacttaagcttaaagctatttaactggagctttaaaagcatgtgagcttcctggagcccagctacctgcctcattctcttgctcttatttttgcttttatccttttagtctgaagaagcctaattagaagcctgaacagggctctctctccctgcccttaaatcagtaattggcttcagtgcagagactgtcaggaaattaacacatcacaacatgacagctgttaattttttctccttatttgtcatatgaatcaccgctgatttgccggagtgcataacaaattagtgggctgtaatcagcggcctctcttctgtgagctgcaccttccctttttttttccctttttctcccctctctctctttttctctctccccctacagtccattacttcactgcctcagcagagatgactgctcctaggtgtgtcattgtcaataaatcagaataagcaaatgctaaaagcgcaagaagctctttaaactttgatgaaggcttttagttacatttttaaacttacactcataacttgaatctttttttttttaaattgtcactccccggtagtgatagactgtcaggtttccagtcatttcctcatccaacgtgccagggaaggtggaactccaagtgtcatttgcacaagttctggctgacggaggaggtggaagaggtgttaaggaaggcaggggaagggagagatatcagagattccaacagggtcagaccaaggcactttcccttttgagtgagagatttaggggaggccaggtatggtggctcacgccagtaatcccagcaatttggaggccgaggtgggtggatcacttgaggtcaggaattcgagaccagcctggccaacatagtgaaaccccatctctataaaaaaaatacaaaaattagccgggcatggtggcatgcacctgttgtagtgccagctacccagggaggctgaggtgggagaatcatttgaacctggggtcaaaggttgcagtgagtcaagattgcaccactgcactccagtctgggcaacagagtgagaccctgtctcaaaaaaaaaaaaaaagagagagagatttaggggagagaggaaaacaggaggaaaaatgggaggtgtacacacagggtgggaggaagagacatggattctggaatctcatcctcctcaacctttccaacttgatttattgtccactatatctgagtcatttgaggagtgtgggcctttgtttgaacgcctttgtagggacagccaggactaccaaacagagtcatgggttctcagactttatttctcattcaaccttgcagaagacatattggtgggccttaaactcaatacttatcacctcctgaaaggaggaagcataggaaggatggtagcactggaaggcttcaccatgtgggtttcagttctagactctaagatttgccaaacaaatctgtgttctctgcatccatactgtggatgcagaaggggaaggcacttcttccttcttccttctcagcctggacctattgtactgacaagcccatgtcttcctaacctggggccagtagggagttggtggtggcttcacattggggcaccgcctctcagggacctatcagcatgttctgttggctattacagactgatgttgaacctaggggtgagagtatttcaagggtgaatttcttctttcctttcatttactacccatccatgcatccatccatgcattcatccatccaccaattcatccattcattcatgcaccaatttatccatcaacccatatacccattcatccacccacccacctatccatccatccgtctacccatccacccatccatccactcattcatccatccatttactcatccatccatccatccatccatccatccatccatccatctccatccattatcagtgcactttgcatgcagcagcatggcatgagcccagtgcatgaacaggaggtcagagggagagtgtgggaaatgctatctatctcaagataagcccctctcaaggtactccaggatgtccccatggtggacatggaggagggcgaaaaagccttgcattcttaaccatagccataagcaggtgggttattctatgtatccatattagtcttaagtcatccttttcccaagagttactctaatgactttcttgcactaaattctaatttgctacttgagagttgagtttggttcagtttatcgagtacattagcaggactattatgcactagatactagtttaggagcaaaaaattcaataaattagggtctatgcccttgaaaattatataggttttagaaaagctgtcataattttaaaactatgttttattcgtttgtttttcaattctcaacacccaggatgtggaatgtatgccctgcaggctggtctctttcctgagagctgagatgtcctgtcctaaggtacacaaaatagtcttctaaacatcagccattttaatagacagagccatgaggtcttgctcatgtgaaagccactgaaatcttttggaaatataataattgtcttttttttgcttgtgataatttatgtatgttcaatgtatttaaatacagtttaatatgctgcatcttataaaaatcactgctgagaaagtttctgtctaatgtcatttttgtaagctccaagaaagggtttttgagcaaaataccaattttacaattactccgttgaatcctaatttaagaaaagaatcatttattcattatgtgaggtggaaagaattttccaggagagactaagattgacagtaatgaagtaggagcttcacagaagaagcggtagtgggagttttgaaattctgggaccagcgcaggcccaccataggtatggacacctggctggtcctgagggcccccacaagagtggggcatatcaggttagatgcctctgaagacaataaggatggattcaataagtgtttccaacacttggcagaatccagtggaccaatgaatcctgccacctgctggctggcccttgaggggaagggcgctcttcctctacacagtagtatctctccagcacaagctgacttcactatcctcccattcctgctgtctttgacctgtagtcatcttctattcctacgttatacagagcttgcttttctctgagcacatcctttgtactcctctcccttcttaatggctgtatggaagccatgtttcttgattaaaaaacctccttaaacacaccttatatcttcaacgtccatgctatagtgactgctgtggtcttggtgatacactttaggaagaaactttccctgcagccctcgagggtggcatgtcaggatcaggagtttgtgtcttctttgtatcccaagacttttgagaactatttctacttctgcctctgcaccttttagattagcaccatctggctctgctaccctctacttcttatgatccccagcatttaccactctcctgggcacttttgccattcaccaagaatcatgagaactgggtcaacatcctcctctaccaccaaatattgtcattatgaagggtgaactcagctttaacaaggatgatctgtagcccatcactgttgtgttacagatgactgatccacttgcccatctcagtgacctcaccctactttagccagccagccaggtgctggaccatctccgcccctaggtgcaccataccttctccccaaaactacaactctctcaaatcttaaatgctagaaccatctcattctcaggtccaatgtcttatcctagctctcttaaagatttcctcatttttgtacatttacttctatttttctgagacttctgggtcttggatgctgatatcatttgtattcccacccaaattttgacctgtcatcccaagatgtcaagggagggacctggagggaggtaattggatcatgtgggaggtttctcccatgctgttctcatgatagtgagggagctctcacaagatcggatggttttatagggggctcttcccccttcacttgcttgctgtctctcttgttgctttgtgaagaaggtgccttgcttccccttcaccttctgccctgattgtaagtttcctgaagcctcctcagccatatggaactgtgagtcgattaagcctcttgtattagtctgttctcacgctgctataaggacatacctgagactgggaaatttataaaggaaagaggtttaattgactcacagttctgcagggcttggggggcctcaggaaacttacaataatggcagaaggggaagcaaacatatccttcctcacatggtggcagcaaggagaagtgcagagtgaagagagtgaagatggttataaaaccatcagatctcatgagaactcacccactatcacaagaacagcatggaggtaactgcccccatgattcaattacctcccattggatccctctcatgacacgtggggattatgggaactacagttcaagatgagatttgggtagaaacacagccaaaccctatcacctcttccctttataaattactcagtcttaggtatttctttatagcagtgtgaaaacgaactaatacagatgccttctgagcatcttctgagattctgaatagaatcttctgagcattctattttccttctgagcagtgctttctccctttgtttctccatctcatctccatggtcttttgtttcaaccattctcatgccactgagtctcctctatgacactcctcctttgcttgtttatgcctcacccaggcaaattcttattcttgaagcaatctcttcattccccacctctattttcactctgagttggcaaggaccactggagaaacatcacgcaaactttgcaaagcttgcaaactggaggcaccacaaacacaagttctttaggtgctgatgagtcttctgcactgatgagcactcctgcaaggtttctctccagggcagtaaatcctctgagtggttattccaaaactccttaatggttttccagtcccttactgccacctccctccctcacccttctccttctctcccctcttggtgggaagtctgtccccatgttggaagtagttctcctatccccacctccctccctcatcctcctccttctctcccctctcacagcagaaagcccataccctagtgttggagatagggcctctcaatttccctctgctccagtcttcccattcctgccccctgagcaccatggctgggtggatttattccttcatacacacacacacacacacacacacacacacacacacacacacactacccaggctggagtgcagtggcgcgatctcagctcactgctaagtctacctcctgggttcaagccattgtcctgcctcagcctcccaagtagctgggattacaggaatgcaccaccgcacccagttgatttttgtgtttttagtagaaacgaagtttcaccatgttgcccaggctggtcttgaactcccatcctcagatgatccacccgtctgggcctcccaaagtgctgggattacaagtgtgaaccactatgcccagatctcttctagattttatcatctcccactctttatctctctttgcttattccttccaacaattaagcatacttaaacatcatccacatttatgaagaaagatatctcctacagccctaaggacctttttgtcctcacaaccagtaagtttctaaagagttatcatctcttgctggacccacttctcatagctctattccctctttaacatactactgtttgactttggagccctccatctctcaccaagattgcttaaatgcttgcagacagataacacttttcaattttcagctaacgtgttttatttttccgcaagcatgagggcataactacctcttgaaaatttgacttacgagacaccacagcctccctgggttctttctttgctgcctttctggccattcctttttgggctccttcggagacttctcatgatctcctctctctctctctctttctctctctctctctctctctctccatacaatatgtcatttccttggggttttattgtattttttctctttaccctacgtactctgtaggcaagcttggcctctccttttgggcttcaaatatgactttaagcctaaactttctgggcatctactcttggatatctcatgagtatctccaaagcgaacctgccgtctctctccccgtcatcaatggacttcggttcttttccagggatgaatgacaagaggtcatcctgggtttcttcctctccaatacagtcactgtctaatcaatcaccgaattatattgatttcccccatctgtccattcttgccgttcccactgccatgaccctgatccaccaccactactttctctcatttgattaatacaacagcttccatcttgccagccttcactatacccaacatattccacactgcagccagcatcctttttctcaatgcaattttatttatttattttgaaatagagtattgctctgttgcccaggctggagtgcagtagtgcaatcatggctcactgcaggcttgacctcctaggctcaagcaattctcccacctcagccttctgagtagctaggactacaggtgtgccccaccatacctggataattttttaaattttttgtaaagacagggtcttgctatgttgcccaggctggtcttgaactcctgggctcaagcgaaatttgaccttgtcgcctgcaggctgagacactgctgcagactgccctcatccttgatgtggtttacaagaacctttatgatgagacgtcagcctagggtgggtcctcatttgcccacccacatcacaggttctaatccagaaacactgaattcattcagtttcctgaagttctgatttttctctactctctaggcctttgtccatggtattttctctacctagaacaccgctgtctacccatttactcctcaggtttaagctccactgttgcttcctctgtgtagccctccctaatgtctgtccccacctcctaatctcccaacccagagattggggcctgggtttctgttactagcaacacagccggatgtggcagctcacatcacgtggccttgatgacatgtctgtgccacatcaggccccactctgagaagacagtactctgtgttggggtagaagctccgttgtgttcattgctggagccctgccaagcaccacgccttgcccaaatagtttctctggaggtgtcagtcgagttggtcagatgccttagtcatcggtatccacagggacagacctgaaggtgccttttcatatccttgcctgcaagtcagtctgtgtcttagactctaaagtttggaattaaatttattatctacatatcttttggattttatctaattttctaagacagctgggtcaatgaaagtatctttatatccccaaataaaaactcacaagcacttagattccgcatgaatctaagtagctggtgatttcaatctcctagcagatgcttggccctgcaataggcccagctgggctgtgccctagggctaccgcccctcgcacatgttggaacccacccctggtattctggagaagccctctcagctagaattattttcagttcagcagttcctgaaaccctagagcctgtagagggaaaaacagaaatgatttccagtccagggcaaagtgaggctgcatggaaaaagagagaaagtcagttgttggacggcatcaaaagtcagcctgttctattaggcaaaaataaacagaggcaggcagaaaccaaacaagacaaaaatgttcattagctgcgccaacccaggccacccacttcgttgaactgaccacatcacttcgagattccctacacacggccccacccttccctgctctccccaggggtagacaaggcatcagagtggaaaggaagagaccagcttaaaccagaataacctccatcccccacttccaaagctgcccagagatgggctttggcagcagatccaccaagacgtcagtcgtgggggagttccctgcctggctgcctcggtttctccttgatagcacagactcattgttatccgtttacggaaatgagcctaaaacaggggtcagaacagatcagtatctgtggggaagggcagcattctttggagaggcgtattcaggattcattatctctttataattaaaaacaaactatgttttcccattaaactttacagaaagttaagtccaattaaagcatctggcctccttagggagtgcggagatagcgtcctcattagctcctgcagcgactcttggggttgggggaggaagggcatggagattttactttatttgtttgttcactgagttttttcctcactccaccgtcatgtgaaggtggggatctgcacattttgctcaccactgtattctcgactcctagaacagagcctggcacgtgtcggacaactgtggagggaactgatgagtgaaagagagaatggagaaaggaatgaatcagcataagccccacagggacaaagactgtaactggagcaccctttcatccccactgctggacacagggtggggaacactaaatgtgcgctacgcattgtttatcgaaacaggctctacatcaaaataaaaaacaaaacgaaaaaacaggaagcttttctggatcaaggctagcgttttacagttgagatatggaagcccaaggaagaagggaaatttgagatttgcttgtagcctctgagctggtcagctgggaggctctggccaaggtggggttgttgagccccaggtaaaagccccacccagcccctcttcttgctgtctgcaacagggcagccacactctgtgctcaccagggagtcttatctggagttcaagtcccaagacctgaccttcggggcctcccaataaaagggcagagatctttcctcatgaatacgccgggcccttgcggctccctcaactctcagcagccgccacagatccattctcctctctggccccaagagcacacctgcttgcaggtttctggatagggctaaaatgaaaccgggacaggtgtcaggtgaagggccgaggtctaggcctaaggggtgctgctttgcccagaaaggcccagatgagccagccttgatttgcagcacttagaagagcccctgtggcttttggcaactcaggacaataggtgaactcccaggaaagtcactctccttccaggcccagcccaaatgctacctcctccagaaggctttgctgcccccagcactggtgcgatgtacccctgcttggtgggagtcctctcctctgggtctccagtcacttctcagtggcctccctctcagcttgttcatctgtcgttgcataggaccgtgtgcgtcaacaccaggacaatgtttctggtcttctttgaaccttctgtgtccagcacagtgcctgactcccagcaggtactcaggaaatacttctgacaggtagaaaaggcctctctgcatctttagaaccagagaagccaaaagaaactgaaaagatgctctataagaggctcaggggttacagaaggaaaggctgtgaaggaaaaggatgcagccctggccaacaagctgagatctctggccgtcctgtcgcctttctgggcctcagggccacgaggctgctggatgcagtgggactgacccctggtgtccaccctgggacagtcagatcacatgatccgtattagataaaaaaagcaaatatacacctttgtttaagatgccacatgcctgatcaaagtaaaggctgtttactcaaccacttgttaaactcaggaatagcagacttgctcatctgaacccaagcttgcagacaggacgggagagcagaactcatgcccgagggctttccccggagcaaagtcagggctggaatgcttgccaggacagcttggaaggtggaaggaggcggcagcacctgtcctcagtgtgtgtgtgtggtttttctcacttctcttcccttacccagtctctcctctctttggaggttatttgtggggcacataggctgagtttcctgggaagtagactcttgggaaggagattagtgtgcaggagtttgctaatgagtactcctgagatcccatctatggcaaggaaggaaacaggcctgagcagaggataaagtcaggctgccatgaaatcttggccgaacgctgcagccagtcctgcagagagtcctgaagatgggatgagccttcagagctgcccagctcaagggagagagtgccgagtgtgcctctacataccctgtccccatcaatcaacactgggcatcattgcctgggacagaggtagagcttgggcaaggcagtggtcttcagccaaggcaatcctgaaaggggctggctgctgcgggctgtctgtcaggggctctcccaacagagaggagaatgagttctgaaacgaggtctatgcagcccctcccagcggccaccacatgggggttgacagtgaaggtgatcggagtggcatcagccgtggtagccagagagctgttcagcttgatggggaaagggagtaaggaacgaagaatgcaacccatgtgaattcttctaatcatgccttctctaacccccagcacattaatcttgcctggcttagaagggagtcaagtgtcaaatttaaggctattctacttttttttcttctaattctatttccataggttattggggaacaggtggtatttggttacctgagtaagttctttaatagtgatgtgtgcacccatcacccaagcagtatacactgcactcaatttgtagtcttttatcctttacccccatcccaccctttctccccgagtccccaaagtccactgtgtcatttttatgcctttgcatccttatatcttagcttccacttatgagtgagaacatacgatgttggttttccattcctgagttactttacttagaatactagtctccaatctcatccaggttcctgcaaaagccattagttcattccttttatggctgaatagtattccattgtacatatataccacagtttagtttctttatccacaagttcattgttgggcatttgtgttggttctacattttgcaattgagaattgtgctggtataaacaaacgtgtgtgcaagtatctttttcatataatgacttcttttcctctgggattgctggatgaaatggcagttctacttttagttctttaagaatctccacactattttccacagtggctgtactagtttacattcccaccagcagtgtagaagtgttccctgttcaccacatccacaccaactctattatttcttggttttttggttatggccattcttgcaggagtaaggtgatatcacattgtggttttgatttacatttccttgatcattagtgagttcagtgaggttagcatttttttcttttttatttggccagtatatattctacttgaacgacccgcattctataaactcagacatccaacccggaagcccttcttcattgatcagaaggggaggagaggcctggaggggggaaaggaatggctcccggccatgcagcatatggagccaggagtagagccactgatgctgtctcccagtctagggttgagccaagagcacctttttggcctatgccttgcaggtgaccatctttctctcccatcaacactgcaccgtagacccaaccttgtgaaatttttgcactttcacaaaacccagttcaaatcaatgaggctttctgagttcttattaactgctcagtagtgtcctcaggctacaaggaggcaagaaagagaggagtcaaggtgctgcctttggtccaggaaacaataaccatggccagaaagcaaccaggagtggtggctcacgcctgtaatcccagcactttgggaagcctaggagggtggatcacttgaggtcaggagttcgagaccagcctggctaacatgatgaaaccccatctctactaaaaatacaagaaattagtcaggtggggtggtgcgtgcctgtaatccccactactcgggaggctgaggcaggaggattgcttgaacccaggaggtagaggttgcaatgagctgagatcgcaccactgcactccagcctgggcaacagagtgagagttggtccaaagcaaaacaaaacaaaacaaacaaaaggcatggccagagagtaaagggagagcacagccaggcaggccggaagcaaacaccctgcgagcatattccgacccaaggggcaggtgtgcactgctcagggtgggccaggagagaggctgtggaggagccttgggaatgactttctgtcctggcagtagtgtaaggatgtcaagaaagatgtatgggaggacaaaggcattgcctagggtgggtggtccaggcagggcacccctgcacctcttagcagaacttgaggtgagccaggaagtcacattgcagaaggacagaattgtgtctgatggtcactgtggcaggcccctgtcctacctgggaaaaggccactctctttggagttcagtcaatgagtggtcacactggagaacagcaatccttgatgctctggtggcatccagagttctgcagaggacctgccatggtcgggggttgtgattcataaggaggccactcgctgcaggcaggccaaggctgcagaaggagacatcagggaaacagagggaagacacagaagcggggacatggtaatatccacatggtaaatatcacagcagatatagccctgcaggaattaaagccaccagagattagagtcaacggcagcaaaggagaattttggcggcctcgctgggacattgggccatcccaggcttttccatgaaggtggggacatctggtgtttttatggtgagggccacccaagccaggcaagtgtctttcccaggctgctgcagagtggggcagcattgggtgctcataggcatggggttggccagcagcagcccaggggtcattgtactttgcaacattgcacttgcactcccaaaaagctgcattcctggagctccttcccagttgttttggaaaaggtcagagcaacaactgcatttctagtaccacatcagcaatcaaactccatgcctggattggccttgttgaggggatgatgtttctaagtggttgaatggtggaatacgagcccatgaatgcaggggtgacagggactattgctgggtccctaggctctcattctaccaacatgtgccctatgtaatagtcattagtgccagcaacaagtattcctgaagaaaggcaagcattaatagctagctttgtcaatgaaatgggacagatgttacctgtgtttctcccagggtggacacctttggaagagtgcctgatttgcaatctgccctgcttcatgttatggggaccaacaacattccaggaggcagattgtctgtcaatctgagatttctgatgaaaccgcaaagaacagatttccaacaccatccaaccctgccaagatggagaaattgttctaagctcatgaattcgtaaagttgtttgttactgcagcacaacttctcctatcctgactaatacagcacatctctgcttaaactcttcaatggttttcctggaaactatggtataatcccaaatccccatcacagcctataaggctttatttttctgcctctcttccaacttcatcttccactggtcctgcctttctcactcggtttcagccacagtgaactttctgtttctcaaatacgccatgcttattctggtcccagagtcctggcacttgctgttatctctgcctgggataatcttcctgaccctcagctctgactggattcagatcctcttagattccaccgccttgagcaggcatttatttcccttaccactctgtctaaagtagcccagtcactgtctatcatagtaacctcttttaaattttcttttgagcattcattacgctctgcagttacttaggattgtaagtaaaatgcttctcttttcccctggaatgtgagacaggaatcttgtctcttgacagcacctagaataaggcctggtatgcaatgagagttcagtgaacatttcatgagtgaatgaatggatgtgttatccgtggaattcattgactcatggacaacacacaaaggagagactagatgaatggttccatttttacaaacagacaactcaatgcgtcccagaaatccagcactgctggccctacctagttcctggcagggaactcagctctgatttggagcactgaccatttcctcccagattcgggcacaagattcactgtgataaatggcctgagctcctcgttgcatttaatggaaaaccctgatccaagtggaactgcagccaggtggcccgtgggagccctgggatatgacttccagggagaccacaaaacctggataggcggacgccgttccagatacattaactcataatccccaggaagcgcgcacttccgatgaaggaagaggaggcttcccctctcacaaacactaatagccatggttaatcctcatcccaggaaaaggttcttgcccaagtgtctggagaagcttcatcaacgtcagcacagggacccgatgcagggacagataatggttccagaaggcgtctgctcagcggccttcttggattatggattgtgtggggccgttgctggggtggtccctgagcagcagggagactggtgcagccccaagcagctgcccggctgagctcacctgcttgttcttggtgtccagaggcggctgtggctgttcctggaatttcggatgtgtgcttttatgctcagtagggatgcgggagcctgtgtctgggctcctaaagtgaaaagggcagggctccagtgattttgaatcaagttggaagtccgagatgcccatagagccaaccaggctgcctcagccctccaaatgcaccttgcctgagctcctcctgctgccctgcgaccccgacactcaccccttcccctttgtctcctgttctttttcttctagacttggctgagaacatcctccaggtcttaaaacccagcctcctgatttttgtttctctcccctaggctgcgtggtgctggggggatcctgtgtcctcccaaatttcccatcttccctctcatgactactgccaaactccaccctcggtcttttccccaccagtttcttcttgcgagccagaacagaggctctcaaacagcaattcacacacctgtgtcatttgtgttaaacgaaataaaaagaaaggccaagaagtaagtatttttaaaaaaatattttttgaaacaggtttttttttctttctttcttttttgagacaggattttgctctgtcatccagggtgggatacagtggtgcaatcatagttcactgaaacctcaatctcctgggctcaagcaacccgcccacctcagcctcccgagtagctgagactataggcacatgccaccgcacccagctaattttttttcttttttttttttttttgttttgtagatacggggttttgccatgttgcccaggccagtcttgaatgcctgtcctcaagcaatctgcccacctcagtctcccgaagtgctgggattataggcgtgagccaccatgcccagccttccaaggagtaagtttttcataaaaagctaaatgtattttctttaaaggattatctgttatttggggaggattttcattttgagacaacatagagatggcagctatttatgctcacatttttatcatgtggactgcacctggtatcccgaagcctgagcacatccaggacatgggacatttctacctgcccgtcctgttgctacctggagtgtgttaggctgagacctcatcatccacctttctgggtcctgtgtctcacagggaggtctctgggctcgtctgtcctctaacctcttgacccagggatctcctgcaggaaccatcatgagctcacccctcattcagtggatcacattcattcgttctttttcctctacttctttgggctcctcctccatctctccatgccactgccactcctgaaattcagagacctgtcatctcctgctcacattgcagcatagcctccaactattcccgagccagtgcgttttcagctcaccctcatccgccaagcaaaggccagtgtgcccatctagtttaaacacggctttagtctagaagtcacacactggaggccttggggctgtgcccaataagaagacatagtagctacccagggatggtttcttcttcttctctttttctttttggtcaacatgtgtatatctaaatatcagaaggccctggcaaggctgggtttgcattctcgcatgtcagtaattacctggggctaagcttcccctttgaggcagctggccctctccagtttgcccagatcccgccactgcatgttgtctctcacatggtccactccattcatgaaggtcacctacccatcatctgaaggccctggtggctgcaacccctacgtggtttccatcacccttctttccaagaaaagtaagcccatagattctgcgcagaactgaaagaaaactattaagttaggaggctgccgttaagttccttccatggtttggtgagccagcaatagctctctaccttgacttccctttctgtgaaatggggatgcaatcaatcttcacgtctggagtacaaagagatgccatgaagaagcacatttactttgaatgctctgatctcgttggagagcaggtaacataaaaatccaaggtgttattattagatagtaagaaattttgttccatgctaattaaactcacaccttaccacttccacacggggaagaggcagcatgacagcctgacatgttaggagcgggaagagttctgcatgcgagcacaagacaggctgcctcctcctcgccgcgcctggccgtgatgtgtgtgtaaatctgccttccagctccttcctctcatccaaccgggactccgacatttgcagagaggctgatggagctctcagctctgcacagagcattgactgttctccgcgcgtgttaagaagttgtcaggctggggtcaggcaggtgaagatttagtgaagcagccaacaaagtttccccgccattgggttgccaccacttatggaaacgcctgcagaacgcaagcgagaaaacagatatttctcctgcgatgactttagcactcctttggggatggggacattaagtcttcctccaccgccaggaggctgctgacagggctgcctcccgaagacttggtagggggcgccttgaaggagagtgggcgccagctctatcgatccgattgccctattgcaagggacaattgcaggagaaaacagcgggttttttttctcctccttattccagggccaaagaaaagactatccatggaaggtaatgtagctgtcaccaaggagagagaagcggaaattcacggttctcttgtgaggcaaagacatctgtgttattgcaccctaagccaatagtttttaaaacaaagtcataaaacaagctactgtatataaaagaggtggaagctatgcagggctctcccctactctgtgcagggatttgaaaagaagcaaaccttaaaagaaaaaaagcagaatgaggatgactgactacagaaagcctgagggatgtgggtggagctaagaggtggtggggtggcttccctccaacaggaaggatgcctgcttgcactcaggagggagggtttgggggcacatgaagagtgaggagctggacagaggtgacacccaggcctccttcagctccagcccaggagagggtcagggcatatgcagtcccagagctctgtcactgtcatgcacacactcacctgtgctgagcacccatgggcatactcagcttccacaaacatctacccatctgatttccaaaaccacctgggagacaggccagatggaattaccgtcctcattttttttttttttcagatgaaagaacagcaacttggagagatcctcctagttggccaaagccatggtacaggtcttctgacctaaaatccagtgccctattttttttttttaataaaaccttctttcttcttctctgtcaaggtaggtccatcagcctgagtctaaaacccacttaactccagtggatggtgacatgcactaggctgttcttgccaatcctatagaaagccatgtgtttggccctcatggccattgtagatcaccgggacctgctagaatcctactacagcctgttggcagactgtttcttggatggctggactggaaagacttcaccaaatgggccaattatctaaatggtgagttgctgttctatttatttctaagggatacagtttgggccctagaattacagaattcagaatgggagggggccttcattcaacttcccatcagcataagaatcttctcccaaagttcttgactggtgatgctctggtcttcctgcactacagggggcatggagcctgtcctatgcacagacctggtgaagggcaccagccacccttttgtaccagatattcccaccgtgtgtcctggccacgcccttcattgcactgggatgatgcccacatgtaccaatccctatactggccagtgacctctgaccctgcagcaaaagataagctgaaccactgtccttccaggaatgggagctaagatcagtgtcagagggcaggggacttccaggttgtgggtcagtttcaggtagacagagccacactggcaagccaacaaccaatgagagctggggttttgaggaatggaaactgtgagaaggaaacaaggctagtgggatgcagggaaggatgcagtagacccatgccatgtggctggcctatgctagcattgatcatccaggtcaccaccggggtctgaccctagctcaagtcagtatgaacaggggcagacctgcggtatacggctgcacaagctgtgcactgcacaaattatgacctcttctggttggcaacattatgggagcctttgcctggcttccagaacccaggctagaggtcacacactggagggttgggtttgagctcagctctgcctctgactgggtggcttcaatggaaccctgcctctctcagggctcagtgctggctgcctgtgaaatagaatagcaatgccagtcccacctgcctcaatgtgctcaggagatgagaagattgtgatgagaaggggcttttaacataaaagccccatgcaaatataaaagttatcgttctttaaaaaatgttctgtgatgtgaagagtggacgtggattcatcagtggaaacaggaaatgggtggatgagtcagctgggcccgggtggacatagttcataagggaaacacttgctctccggcattgggaaaaagagtgtggatggctctcagcagccagtgccctcctcctccaagtgcagcaagtgtggccacagctcataggtgccccttctcgggataaccacctctgccatggaagctgccatgcctgggaagctgtgttcctgtcaccccctcctagggcagccacagccacttaccggctgagatgaaaggccaggcccttcccgccagttgcaggctgtgctccagaaccctctcccagtggagccaaagtgaggctttccctgagaccgtgtcctgatggggtgtttctcaagccctatcctgcaccctctatctctttttttatttttattttttagaggcaaggtctcgttctgttgcccaggctggaatgcagtagcaggatcatagctcactgcagccttgaactcctgggctcaagtgatcctcctgcttcagtttcccaaagtgctgggactacaggtgcataccacctgtagtgcctgactctccctccatctcttaataggccttgcacaaagatactccttcagagctcatctcataaaaatccctggggcaggccctacttcaccagagcccaacgtacagcggcagctggcagagaagtgagtgcgggagcacttgattgaatcttcatgtagccaggccctccacatgcctgagccactgtactggggcatagggtaggggagcctggaagcaaactctgcatcctagattcacatgcagacatgtccttaagaggggtccctgaatccaaatgtccatcaatgatagactggataaagaaaatgtggcacatatacaccatggaatactatgcagccttaaaaaagaatgagttcatgtcctttgcagggacatggatgaagctggaaaccatcatcctcagcaaactaatacaggaacagaaaactaaacaccgcatgttctcactcataagtgggagctgaacaatgagaacacatggacacaggcatggggggcctgacagggggaaagaggagggagagcattagcacaaatacctaatgcatgcggagcttaaaacctagatgacaggttgacaggtgcagcaaaccgtggcacatgtatacctatgtaacaaacctgcactttcagcacatgtatcccaaaacttaaagtaaaattaaaaaaagaaaaaagagggaaggaggaaagtactgagcagagggagaaggtgaaccgggatgcaggcacacgtgaggccttggccagtcccacaggcagctctgaactgaatgtctatgtcctctgcaaattatatgttgaaatcctaacccccaatgtgacggtatcaggagctggggcctttgggagggagtaggtcatgagggtggagtcctcgtgagtgggattagcgcccttataagaggccccatggccaggcacgatggctcatgcctgtactcccagtactttgggaggctgaggaaggaagatgacttgagctgaagagtctgagaccagcccaggcaacatagcaaggccttgtctccactaaaaataaaaatatcagctggacatggtggtgaatgcctgtagtcccaactactcaggaggctgagttgggagaatctcctgagcaggggagatggaggctgcagtgagctatgatggtgccactgcactccaacctgggtgacagagcaagatcctgtctcaaaagaataaataaaatacaataagatacataaataaaagaggcgtgggagagctccctcatcccttctgccatgagaggattcggagaagatggtggtctacagaccaggaaaactgttctcactagacacggaatctgtaagaaccttggtgttggacttcccagacttcagaactgtgagaaataaatttctgttgtttatcatccactcagtttaaactatttttttaacagcagctaaaatgaactaagacctttggaagggccccatctttgcatcctgtctcaaccagtaattgggtgtaggctgcccccagggcatggtatgaccttggggagccagctttctctagcagaggtcaattcttagaaggaattcggctgaaagctgtcagggaccagccttctcgggagccagagaatgcatctcttgttcctaaaggggtcatctgcatggtgtagctactatgtccttccatcatggggcaagcagagctttccctcagagtcaacttatctcaagcataaaggattcggtttttccaacggaatttccaaatcattgctgggtacctagtgctgtacaagtgaatccctcaggtacgttgcatctgcctgtgaagagaccgctatgtgggaggagaggcaggcaaggcacggcttataccttggccacagtgactgcatgtccgcccaggccattcctccccactccgtccccaagctccgtggacctacctgcctttataggttgtgaacccagaaaatctgagataggtctcggttaatttagaaagcttatttggccaaggttgaggacgtgcccgtgacagagcctcaggaagtcctgatgaaatgttgcccaaggtggtcagggcacagcttggttttatacattttagggagacatgtggttcggtctggaaaggtgggacaacttgaagcaaaggcaggaagactggaagtggggagcgagcttccaggtcacaggtgagacacaaacccttacattcttttgagtttctgattagactctccaaaggaagcaaatcagatatgcatctatcccacagagcagaggggtgactttgaatagaatgagaggcaggtttgccccaagcagtttccagcttgagttttccttagcgattttgggggcccaggatattttcctttttcaaggtgctgaagggatcccaagaagcgagggactgattttttttttttctcagccccattgcaatggaattttttcattgttttcctcatgttctacctgcaggagtgtaccctgcaccgcttcatgcaggacattctgaagagtgtgagaagcaaaaaaagaatctttgcaatgtatattagtaacatttaattagccttggattacttattaagtgacaattatccctattatgcctgtcacagatgagcgactacatactgtctatggtttatgggcctaaagttctccacggagtgtcacaaattcccattatgtccccagcgctgggctttgcatttggaatgtgagcagaggtgaatcgtcccctttgcacagccagatgtatccctgttgacttggcaatgaggcagggtcgggccagccttccttctggtaaatgcagaaaactcattagcagacacactgttgatggggtgccctggctggcggaaggggattgagccattgaaactggacaggtctcctccccaggcatcatcctaaattctagtctcacagatgtcacactggagggcctctggagatcatatcttcaaacctttgaatttgtcgctgggaaatcagagttgcagagagcatgtacggtgtgtctctggaccacagctgcatccctgaacattcccactatgccagaggcatgccctagacacagaatcctggacacctcgctacagaaaggtcctttttagccaaatgtccaaatgtcccataagccacattccctctctgtgacctctttctgacaactccctttccatagaagctggagatctcaggaatatgtagacagctaatgacctcccccatcatcaccaccccaaaagtcactgtgatacatggagagatgggcgccatattcctcaagttctatggtgcatgaaatcctgcctttagactttttatgtggaatatgtcatactcttttttttaatattttttattatactttaagttcagggtacatgtgcatgacgtgcaggtttgttaaatgctcatgatcactggccatcagagaaatgcaaatcaaaaccacagtgaaatatcatctcacaccagttagaatggcgatcattaaaaagtcaggaaacaacaggtgctggagaggatgtggagaaataggaacacttgtacactgttggtgggactgtaaactagtttaactattgtggaagacagtgtggtgattcctcagggatctagaactagaaataccatttgacccagccatcccattactgcgtatatactcaaaggaatataaatcatgctgctataaagatacatgcacacgtatgtttattgagccactactcgcaatagcaaagacttggaaccaacccaaatgtccaacaatgatagactggattaagaaaatgtggcacatatacaccatggaatactatgcagccataaaaaatgatgagttcatgtcctttgtagggacatggaatatgccatactctttaaagaatgtatactgtctccaacacaagccatcaactctttggcataaacgagctttcgaatttcctctgtaaagtgcattttaaaacaccaaggtctaagaaaagtcagacatggggccaggtattgtggctcatgcctgtaatccatcactttgggaggcagaagcgagtgtatcgcttgagctcaggagttagagaccagcctaggcaacatggcgaaaccccatctctactaaaaatacaaaaattagccaggcacggtggtgcatgcctgtagtccagctacttggcgggccaaagtgggaagatcgcttgagtcccagaggcagaggttgcagcagtgagcctggattatctttctcggatctgtgagccaagatcacacgactacactccagccagggcaacagagcaagaccctgccttcaaaaaaaaaaaaaaaaaaagccagacttggagaggggacccaaaggtaaatcagggacagtcccaccctgggggagaaactgaccaagatggggagtttcttgcaggcttcccaaggagtgaaggaggtgggcaaaacaaggatggagaatgagcagccttagaggccacatgcccctggcgggaggtgggggagaaaaatataagctggggaagcatcctggtagtgtcttaccatctgaccattttacacaactgaaactcagagcttttgtacaagggcagccaaaacagatttgcaagttaaatgtaaacaaaaccacaaaactattacatttaaatagaaagtattacaaaacaatggaatttaaatcagcaatattaattcagcacaacggatttgtcctgttctgacgtaaaaggctgttcacagtatgtgagtggcaatcagggccacccagtgcactgtgtcctgtttggccagccccccttggcatgggctatggtctgattccctcacttaccacagtgaagccttcacacatccagccactgtgtgccaggcggcctatccttggacagaacacatcacctattcatagcaagtctctctcggcaattctcattagtctgcaacaactgggactgcactactttgccaaactgatcaaaccataaaatcaaacaccagctctgacatcacatggtggcattcaggctgggcttccataatccttgtaaacataacattatacaattcacaaatagtaagagcttatgatctaccagttaaaagctgagacatagagatcaggctgaaactctctttcatcactgccatgaacttcatcccatctaagtacaaccttgtccaaagcagaggcagatgttgcaggattttcgggatggagtctaaggcccagaggcctggggtggagtcatcattctaccgctttgtgctgtgtggtcttggcgagtcatcattctgccgctttgtgctgtgtgatcttggacaagtgacttcacctctctgtgcttcaactcctcattctgtaaaataaaactcagatggtaactgcccccataaaatcgctgcgagcatcataggcatgttaatgtatgtgaaatatttagaacagtggctggcactatgttagcacatgtaatgtaaataagcattactctcaggttgatgtggctctttctagatcatttgtacacatttactaatgtgcaaatatattcagtatgttttgatgttttaaaaaatatttaaagatgcaatcatacttcctgaatcattctgcaactagcctttgctctaaataatccatgagcttcaatatttcctccccaacacatcactacacacgtgccaagcagatctgaaagagcatttgaatgggtgcggcagtccacacctgtaatatcagcactttgagaggctaagctgggaggactgcttaagtccaggagtttgagtccagcctgggtaacatagtgagactctgtctctaccaaaagatacaaaaattagctgggcgtagtggcacgtgcctgcaatctcagcactttgggaggctgaggcagggggattgcttaagaccaggagttcaagactagtgtggcaacatagcaagaccctttctctataaaaaaataaaaaataaaattatccgaccctgatagtgtgcacatgtggtcctatctgctaaggaggcagaggcagtaggattgcttgagcccaggagttcaaggcttcagtgagccatgattacaccactgcactccagcccgggtgatagaatgagatcctgtctgtaatccgaccaaccaaccaaaccaacaaacaaaagcaaacatatagagctgagactaagggtggtgctggctcatcctccgcctgctccactggtcctctctggcctagcctttcagagcacagcactgcagtagctctctctgctgattctgccgtgctggggcctccaagtgccttttacagcacattaggaatctggcaccataagcactgaactttcctaaactgaagttcattttaaatgcactaaggcaaagaacaattcagaggaaacttagcccatctgtgtgtgtgcgtgtgtgtgcacgcatgtgtgcatgcatgcaagtatgcaaagagtcccctgggaattgctctagctcatgtattagggcacatgtggactgtgtattgtgagagcagagctacctacaatggcagccactgtatttttcaatattaaaaaccactcctggttactggcaaacagccaccttctctgctgtggaaagcctcatgccctgggctcctcaccttacctaatgacaagatatgcacataggcaacatgtttggaggatggcaggggctgaagggattatggctagagcaccgggccagcagcccacctctcctccacagaagacagagcagaaagcatggcggcaggcatttaactctgcacttagccgctgctcattaacgagctctctggtggaagtctttgcagctactctctggcactggaggttttgtcatcccacccacgacaacctctgttagtcaataataacagcttatttaaaaatagcagcatcaactgtttgcactgttattatctgtgcctggcttctagccccagaagacttgggaaaggtgtgcgacctgcttttccggagcttctcttgctgaacctgtttccagatctggggaaaagacaggcacatctttagcaaacactcacaatgtaattgccaggcagttatgggctgcgacagtaaaatacagcagttggcggcacggtaggttcattagtcaataaagcattgccacgcgttttattgaattgtaaccctattttgccctgatgcggaccttgtggagcctctaccttcacataaatctgagtgattcatttagcattcaaagtcgagtaaaaggaggatttggtccaattccaatgcaaccctgctccattagctatctctattattatctgcctttgcctcctccgtcagtggggacattttgataaaagcttacatcggaaataaatcagggagtgaatggcaggacatgaacaaaatagctttcctataggccactctgtccctggaatgcccaggaatggctcagggctggtaaggagaccgagtggacgattcccctggcatccctgcatccagccatccaacccactcaagacgccgctggtaaatgtatactacgctcctatttttctaatatctgacttgaaatacatttgacatggtctacttaatgttagatagctgaaaaatattttattatttacattgtttatttcaggacagagatttagctctatcactaaaatgtccacccccaaagtgagcaggattctaaaactagaaaataataacagggcacaagtcaatgttattcattccatatctgtgagaagtaccccaaataatttgctaattttaaaaaatcatatctgtttgcaagcaatattctcatatggttgggggatctgggataatcagagcaagaaggtggacttacaaattgtagggagtggaaaatagaaaaaagatttataaaataatatgaaaatatgggtgctgatgagaaacacaatttttacttttagaaaatggtatttttaaagtgtaagaaatgcaaaattgattactgagatctaggatcaacgaccagctatttttttaaaaaactggccaaaaaaataggaggaaaatactaaaaattaaggcaaattcaaaagagaataagatagaagacaggaatttcaatgacccaacatcaagtccatactctgacctgcctgccccactagaaggaaaatgagcatatctttttacccatgccttgtctgagaaccccaaagtgtccagttatttctgagacttgaagacagtgccccataatcccatggtggggtgctgcttggctttttaattatgttaattacatgtttgcttccttggagtttgaggccagtggtcccgttcagcattgcaccttatacagaaccagtaacagcagcatcgggggaggaagcatcagttaagggaaccacaggtgtgctatttgtttccgatggccttcctcgtctcctgatagctgacagttcagcaaagggaattagtagcacttgtgggcaaagaaccgaagagactctttttccctattcgatgagtgccatatgaaaggttgtttccgtagcagctcagagccctccttgctgtctcctaaagagaagcctgccaagtcggggctgtgggttttaagaggtacaaacaaaggtggcatggtagggcagaccagaggtgcggggactcaatgcagacttccccatggtttcagggtgtcaatttccaaaatgtggtccctgctctccttcccgccagactctgagaagcaaaccttgctggcaggaaacctagccaggagtggctccgttccctggcctcttctttttttctgccacgtgtagccctgatgcccataactaaaaatcacgttcataatttaatttggggggatcggttgccaaatgctcattaaacaattgggtctttgaaaatgctatctttagattttttttaattgacctattattttctggctctagctgccagatcccccaccgcaaacaaggagaagcttgctacctggactttctttgatgaatagttttaattaaaaaattctgtaccataagtattttaatcttacaaacataccaaaggtatgcagtcataaatttacaaacacatttaaattaatctataaatatgctgcaaaattgacaaggcatatttaagccgaaggatgcaccatagatgtgctaataatgacaattaagaatcgtgtaaaataaatgaaaatcaatactcagaacaggttgacaaaaaggaaaaaagggaggaactaaaacaacgtgtagtttgactattaggggaaaaaattagtagctgcttgtagttttgaaatgtctactaccgtgaaggaagggctcctggtggcatttttttttctcattctcgtggatcataaaaacgcccctgctggggtgacaagacggacctatttgggttgggtggtctggaaggaggagggctctgcttcaattctctaaacaaaatatacaccttgccagttacagatctgaaaggaaaccatccaaggtaagctatgtgcctagatgctgacacatggacacattttttttgcacatggtgatctgttttctgctttttaagcactgggacaagttgtgggggtgtctgtgctccaggaggcaggagtattttgtggccaagacaggtaactacctgtgctataggcatcacgggtcatccactcacaggagcaagaggtgctcaggagcacctttgtgtctcccggcagaaagcaccaactgcaaagagacgtgagtgtgccgctcccactaattcacagagtgccttgctgtgccgaaccaggaaacacacgctaaccttcatggctacattcatattaaaagacaactttgcgtctttcaatcatgtatttccctctaattaaggcatattcactttttccccctaattaggtattctttgttgcataatgtttgctctaatctttcggaatctttctcaatatccagtcattacaggctcccctcgaattcaaccaaagcatgttattttttctgctaattacatcctcatttacagattggcgcctcctctgattggctctgcgcaccagttgctatgacttcattagtcgtgtctcctgaccctgttatttcttgtgacaggacttgctcctcgtgtcctgtggctccagatccctgggtcacttctcaccagggttgaaatagtgtcaaacacacgagggtttagggtgcgggaatcagtgctgcagttactaattactacacacagtaacggtacaaattactgctgctggctgggcctttatttcctcctcttttttttaaattaatgttttaaaggtgtcattagcaggttagtttcattttaaaaatgtgcctgattaaaaaaaaaaaaaaagcgaaatgtgtctccctgccagggctctttcacatacagaaccccaaaagctttagttttgtagggggctgccgcctagtgagcacagaacttcagctttggctcaattaccatcaatctcaaaaatattgaattttaaaatctcgaaggtggtgctaatagaattttctaacccaaggcattcacacatttaaaaaaaaagaaaacaagcgaaatttttaaaactatacaaaatttcaacacacgagcgtaaattgtatttattaaataacaagatgaagctctctaggtaaccacatttaaaaaaaaagaatgtagctcattagatgagttatgtatattaagggataattaaaatgaatgaattacatttgagtaccaatgctatctttttaacaagcagaattgggtaacaggacctgaacatttagggggtgcccaaggcagagagtgtgtgtgatcctcactttcggattctaggccatcggaatatcccagtttcctggaatcaaaggtccaggaagagtcaagcctgcagagtttaaatgcaagttagttaatatgaaaaatgctgtatctagttgtttgcaaaattacttttgttgattaaaaggctcttcagaacttccggctggtgaaagggttttaaattgtctaatgctgattgtgattgctatgcagaaaaaaggcagtgcaaagcaaaccattatatcactgaatctttgttaagcaggccttgaaagtgtctgacagcataattaatcttgtgatattaacaaagaaaccaactcaatagtattgaagatgcttattaaaaatactaaatacctttttccacttaaaaaaccttttgaaacagtgtgggaagtggcattacctttttgtttttgcagcattttcaactaaaattgatactagggtctacagcgcagcagcaaaattgtgaagtggacaacaataagaattagtttaaaaaaccataattcccagccaagaacactggctgggctcatcatcctggcagccgcaggctccgacaacaccctttgcagaaaacccactttccaaagtttaggcagaatgaatggttggtaacaaaaatctgcaaaatatgagccttctacacattgttattttcacttggggatctcaagtgaaaagaccaagtgtatacaaccatttatgtttccaaacagtttgagaggcatgggacatatgtggattattcggggttcttttttgtgaaggcagggtttgcaagccagctatttagggcttcctggaccccctggggaactgaaccatgtccatatcttgggaaaataactggggccccgacaaacctcagcactgtatctcacttattctggcaatgtgtgagtatggcaatggtgtcctgtaagctgggcgagacactgggggtatgggcacgggccttggtgagcaggggtagaggagaggattcccctttgatatggtttggctctgtgtccccatccaaatctcatcttgaattgtactctcatagttcccacgtgttgtgggagggacccggtgggagatagtttgaatcatgggggcggtttcccccatactgttcccctggtggtgagtgagtatcacgagatctgatggttttgttggggggttctgcttttgtatcttcctcatttcctcttgccaccaccacgtaaaaagtgcttttcacttcctgccatgattctggggcctccccagccatgtggaactgtggatccatttgaatctctttttcttcccagtcttggttatgtctttatcagcagcgtgaaaactgacaaatacctattggcagaatttttaccttggatggtgactaaagagagcattaatatgtgacacatttgcaattggcaattgctgtgcaaccaaactagtaaccacacaatgcaatcacctgaatgcctagagcaacagcatttatccagattacatgtctgtgggatgacctgaagatcggcaggtcttggctgggcagttccactgattttggttgggctggctcgttcctgcatctgcaagtcagctagactagcctggtggaccaggctggggcagttcagcgccatgagtctctcatgctcactgtccccagcatggccttctcatagtcatggcagaagcacaagaaagcaagtgaaaacccaggaggctgcctaaggctgagggtcctaactgggagtaaatgttacattgagtggccaggacagagttaatggaacagaaacactttgggaggaagtcacgaataggactgaaaggcatatgttaacacatttggatttatcctgcttccatcctgcacttttcttaaagaaagttttaacacctaattataactcaagtcttctgcaaagtaaaaatacgaggtaatttatttactttggtattaaggagaaaaaaattagaatgcagtatgggttttccacaatgtcagtagttaaaagagagccagttagaagagaatgggttggacaatgttttaagccttatcattttcagatgacttgatcattcaccaagcaagcacacaaacagaaaaatccaaactcaacagaaaaattcttgtaatgaacaataaagttattttatttgtcaattatctctcaataaataagggaaaattaaattcagcaaaaatgttggatagaacatcaaactacaaaattcagtggtatttctttttatcaaccataaccaattaggaaatataattctaaaatataataccgcttacaatagcaacaacatataaaggatacagaaataatacttcaataatcctgacagataacaatataagcagatcaactatcctatactaaatctatatctttaattcaatctaaatgaatattccagttgggatttgaaaaaaatagatgtttactataaaatgtacattgattttaagatcgctctaaaatttggtaaacatacaaaatagctcattaaacaataaagaaaatcaaagagggaaaaattgctgtatcaaatataaagtcatattacaaagtcaacacaatataaacagtgtggtattgtcaaagaaaaaaataaactaataaacaaataatggtgctgatctagggcaagctagactagaccactctacagagaaatataaaacaggatctctacttaatgtcacagttaaatgagctcaaaattgattaaatgtgaaaatgtgaagtgtaaatttgaaaggtaaaaatatataattattagaaaagaatacagtgtctttatgactttttaaacagaacttcaaaaataaaaacaatagaccaaaaaactttaaaagatttgatcacatgaaaattaaggctttggttcaatgaaggacaagataaagttaataagccaatgacagaatgggagatgattttgcagtattttcaactgaaaagggattaatacctagacagtaaccccaaaaggaaaataccaaataagatgttcagacaatttatttatttattttaattattgttatatatatattttttgagatggaatctcgctttgttgcccaggctggagtgcagtggcatgatctcagctcactgcaaactctgcctcccaggttcaagcaattctcctttctcagcctcccaagtagctagcactacaggcgtgagccaccacttccacctaatttttgtatttttagtagagatggggtttcaccatattggtaaggctggtcttgaactcctgacctcaggtgataccccccttctcggcctctcaaagtgttggcattacaggcatgagccaccatgcccattctgttcagacaatttataaaattatacttatttactacaaaagttaataaatataaaaagagagaccaaaaatcattaatagtcagagaaatgcaagttgaaacaaaatgatacgactttatacctaaaacatttgttaaaaaaaaaacctggactactagaaaatcccaagtgttcacagggatgagggaaggtaggacatttctgtggggcttgtggagtgctggctgtatcccatatccaccctggagggcagctgtgactgctttcagtgcacacactatctgcaactcaggttggttgcagagtatgcagtgcatgcaggaaatttcccagggagcatgttcagaattaacattcaagagagtgaaatcggtagaagttgaactgaaatgcattcaccacagaggcctcagctattccattatcttttttttttttttttaggcaaagtctcactctgtcacccaggctggagtgcagtggcgcgatctcagctcactgcaacctccacctctcaggttcaagcgattctcctgcctcagcctcccaagcagctgggactgcaggcgcacgcctgcacacccagctaatttttgtatttttagtagagacgggctttcatcatattggccaggctggtcttgaactcctgacttcatgatccacccacctcggccttccaaagtgctgggattacaggcatgagccactgcgcccagcccagctattctgttatcttacagggagatctggagctgggatggcccttcagagctgtctaccattccccaccagatacaaagaggcaagtcccaggacctagggccaggacctctctgagtcccctggagaaagactcagttgagagccattggcagcagctgaggctcccttggtcttgaactggatggcttggtggcccaaaattgtaaccaccatactctatgatccaggaattctaccacttgaaacgtctcttcaggaagctctcacagaggaccgcaagaggcacagtatggatgctggtcacaatattaattgttgggggcaggaattggaagtctgtatggggaaggtaagtaaaatgtgaaaatgtgtagtgattcaaagtaatggattatatgttcacatagcaatagggaacttatcatttatatcagttaaaatacatgcacactaacaatatatgccggtcaagaacacatacaaggctggatgtgatggctcattcctgtaatcctagcactttgggaggctgagctcggaggatcccttgagcccaggagttggagaccagcctgggcaatagagtaagaacctgtctctgcaaataataataataatagccaggtgtggtggtgtgtgcctgtagttccagctactcaggaggcagaggcaggaggattccttgagctcgggaggttgaggctgggcggcaaaacaagacctatctcaaaggaaataacacatactaaagaatagataagcattaaacacactgcaatgattgtctacagagggaagggaattgggttaaaagagaataaataaatagacaagtcaaaaccaaggaatctggctgggcatgatggctcacacctgtaatcccagcactttggaaggctgaggtgagcagatcacctgaggtcagcagttcaagaccaccctggccaacatggtgaaaccctgtccctacttaaaaaaaaaaaaaaaaaaaaaaaagttagcggcatgtggtggcttacgttgtattcccacactttgggaagctgaggtgggtggatcacttgacgtcaggagtttgagaccagcctggtcaacatggtgaaactcagtccctactgaaaatacaaaaagttgactgggtgtggtggcacatgcctggagtcccagctacttgagaggccgaggtgggaggattgtttgaatctgggaggcgaaggttgcagtgagccaacatcgtgccactgcactccagcctgggcaacagagtgaaactctgtctcaaataaataaataaataaacaaacaaacaaacaaacaaaaacaaacaaaaccatgggatcttgcatagatcaatgatgacaatgtgttctaaactgaggattacaatgaactcaaacctctgcacctgagtcccaggggaaaaaatcatagtagtgtcagaaatttctatccattatttaggttaacctcagattattccacatacctttttttttttccacacctaatctgcagtaggtctcctagagctgtggtccagctgatatatctattttttaggaaatcagggatgattttccagatgttttggatagatgttttcatatttgaatctaattaagggtttgcaaaagaccacaacaacaaaaaacttgtagaaaaaggtttacattctttcttcactctttggatttggtttgaagagaacgaatccaagcatggggtttgaaaagatgttgccgatggaagttgagcatggaggaaatcaggagttaggagaagggggaagagagcactgcattgctccagccgggtggagggtgttcctggaggaaacacaagtgaaaagtgaagttttacaatgaggaggagaaacaaagttaaagagatcctcaagtatttttaaactgtgaaactgccaaagagaatttgaggcagaatgtacacagtccacatggggaaatgttttttatagaaaaatccagtttctaggatattcttatcacagggctgggaggcagagaacagattcagaacaatggctttgtcgaactcttaaagccaagagagtccagctccttgtctgaaagtctgtactcctgaaagtaagaaaatatatacaggaagatgcattaagaggcagcccaggttccagtaccaacagtcacagccctcctctgttccttccgcaagcctcactcttttttgagcctcagcttgaccatctgtaaaaggaaaaggtcaacttttttttttctcaacttttaggaactgatgcaaaagagtgatgtaagaaagtgttgataaaatctctgccccagctgtcaggaagctacagagaaacagctgagtcccatcatgtaagcaacaaactgatggtattctttgggaggaggagtaggatgagaaggagggggaggagagagagcaagaggagggtctgggtggtggtgggagaagagaaagaagaggggaaataaaaataatattttaagtggagtggctggtgatatttgtcattctctcagtcggttatagtgtgagcatcttaccacccttgtgtgagtgtagggtttttaaataaacaaacatatacacatagattttctattatatgacctcaatgcaagtcagctacatcatctgccgctcagtggaagtagcaacaatttattccaactctggagaaaaagtagccctgttggatttattgaaaattgacatatctgtacacggacagaaaactggatgatttaaggatttttagggcaattttgatcagatgtgatttcatttttaatttacatgcattattagacatgtgctattacaattgtcccagcatcagatcacacttctttatgaggcaaagtccacctgcctttatagagatcaacattttcaaatatttttctatcttttcttgaaaagagggaatagagacatgagtctttaaatgaaaccttaatgaagcaatgaagtggggacttcaaggaatccattctgcagagtgcagtggcagcaaactgtccacaccttacttcctaaggcaccaatagcataatgagaacaccagtgataggtgtgtggtgtctgtggtgttggcagtataggccgtgtgtctggactcagttgtgtgactatggcacctctctggagttaagtggggtgtccttctcagtccaattgccatacctggctctacaagccttctggataggaaggttactcaaaatctttttagtatttttttttaaattctaaattagtctgactttatttctgatgcttggaactaagaatctattcagactttggaattcaactctcatgcaagatgcaaaaatacttctttaatgtttggtttattcaccaaggaatccatctggatttgcagttttcattgtgatgagttgtttaattactttgttgttgttgttgataataaatagggctatttaaattttgtatctattcttgtgtctttggtaatgtataacttttcatgtcttttatttcttctaagttgttgaaattatttatattaattttctcacaccattcctttattatcttttaaatgttgatagaagatcaacattaaaaaggggatgtaccctctttcattactattagtctccatctgtgtcttctcttttattttgttcagcatatctagaagtttgttgattttattaatctagtcaatcaactttggtttcattgatttttttctatagtttgtatatttatattttattaatttctgcttattatttttctacttatttggctttaattttcctgaattttctagtctcttaaggtataagcctatatcttttattttagacctgttttttctaatgttagcatttaaggatatagattttcctctaaagaattgctttagctgcatctgatgaatatatatgttgtgttttatattcactcagttcaaactgttttggattttctcttgtgacttcttttttgatccatgagattcccagaaatattttctccaaatatttggggatttttagatctctttgtttattgctaatttttattatattggaaatatatcctgtatgatttcaatccttttaaatgtatgtacactttttctaatggcttaggatgttgcttatcttggcaaatgttctatgtgccattgaaaagaaaagcattttgctgctgttgggtgaagtggtgaagtgttcaatagatgtcatgtcaattaaatcccactgattggcagttttatccaggatttctgtatccttatagattttacattccttttattaatttacattccctctattaattacaaatctgtaagaatttctgtattcctatagatttacattccttctattaattactaagagaagtgttgaaatcttcaactatattttgtatttgtctttttttcccttttaattctgccatgtttgctttaggtactttgaggatttttctggtgcatacatgtttaagtttgttatatgcacatatatattatatttatattgagatttgagcattgtgtccttatgaaatgtcttttttatctctggtaatagttattgtactggagtctactttgtctgatattaatatagtaatgccagtctcataattagtttctgcatcacatactttctcctatcgttttcttttaaaccatttatatatttatttttaaggtaagttttctgtagatatatattaatctttggtattcagaaacaaaaaatagaattccaaggaaatattgggaattccttaaattacattagtctgtatttttcataacacttttttgctaaagtacctatttgtaggtaaatttttttttcagtaacataaaagtaatctctacctgacatagacatttgagaatagaaaatattttaaaggtgaatattaacacaaaataaatgccatgcaaaaatcatttaaaattttgaaaaataataccacaaaatttaataccccaaaggtatcattaaaaaatgaaaaatacacaaagaattaattgtcttatgcactagtcttttctcttttttcatgacaaaccttacaaatgtggaaaattttcattcatttttgcattgatgttggttgaatggccaagaatgtacctgaaagcatttgtaaattaggctttagggcacatgtttcttcatatcagattatatcattttttaacaataaaaatattttgtgtgcttgccttgattttgatttttgctaatgaaactgatattctttttgcaattcaggttttagatcagtttctaatcttatttcagagtattccacaaacatgtgtttacagcctggcaacagctatgactgagactaaccgaggaggttatggttactcttctgcctgctccttccctggtttctgtaaatgtttatcttaaccttagactctgcacattagtggttcctgttcatgcttttgagttgacatcagtggattcctcaaaactactaggttggtgcaaaagtaattgcggtttttgcctttgaaagtaattaaaagaaatgtctatatttatcgttaaccttgaatttgcatccaagatttatacttttttcattttcccaatttcttgactgaaatataaaaatctcccaaaatgcagagcaggaattttcacaggaaaacattaagcatgtatttggtcttgtttcttcatcgagtctgttcatctctggcttttaattggtgtgttagactattatatttattataattattaatgtggtatttcagtatttattttctatttctcccatctgttctttgcttcttttcctaccatcttttgaatcaatcgagtattttttagtattccattttatttttaccttaggcttatcaggtatacatttttcttccatttttcagcaattgcttatggcttgccatgtgtacctttacttctttaaaggctgctttgaaatactattatgttacctcaggtttaacataagaaccttaaaatagtatcttccactttctccttcccgtcctcccatccattgtgctattgtgcccagacattttaattctgcagacactttgaactacactactatctatatctatatctttttaaagttatcctatctaaaaaaaaaaaaaaaaattgaaacctatttcatgattactcacttattagccatttctggcagtgtgtttactggagttgctgaatgcgtgaggcattcttcccttaccagtccgaaagttaaaccagttaaactctgccattttgcctcttagtgggcatgcttaagcccgcttgcccaattcttgatcttatcaagaattgacagaatcttatcaagaatcttataagatcccagttcttgagatcttatcaggaagctgctgatcaccagtttcagatgtttctgtccatcaggagactgcctttccctggcacttacccctttttataaatctgtttcaatttggtgtcatttttcctctacccaaaaagctttctttaatatttttgtagcttttacatatgacattgcttctgcttgaaaaatgctcttcccccattacctgcatggtcagttccctcaatcctttatgcattttgctcgaatgttgcagtctatgtggggtcctttaaccacctttcaatactgcaatgctctgtccccatggctctctctgtaaccccgccttactttatttttcttacaacacttaacatctgacctgtttggtagtttggtttttgtctgtctccctgtcattagaatgtaagctccatgaggatggagctttatacatacttttttccacccatgtgcctatacaccccttcctagttatgttaccaactgaatgtacccaagtcacacagcaccaaagtatgtaagcggcggcgaatccatacgggtctgcagcaacctcagttcttgtctcctcagaagaaagaatccaaacgaagagcagagtgagagaccgaggcaagtttagagaaggagtgaaagtttattaaaaacttctcccctgattcttcccttgcggtgggctgtgcccatgtacagtggcccagtagcacttgggaggggctgcatgcgtggtgcgtttactggagttgtacgcatgctcacatgaggcattcttcctttaccagtccaaatgctataccggttaaactccgccattttgcctcttagtgctcatgcttgagcccgcttgcccaactcctgagatgtcatcgggaagctgctgatcagcaattacaggtgtttctgtgtattgggagactgcctttccctgtcattgatcaattatttttttagagagatacttaacaactacctcaccatcacttgatggttgcctgacattcctgattggtgagggagagagggagggagtcaggggggctctcctgccctgttcctgtctgactagctacctgctgtaacaattatactagtactagtgataaacctatcacttgtgcctatgacagggccttacacaaggtagataaccaatgattatggttgaattaataaacaaggcctctcttatgcccctaaaaatgcagagatgctcttctcacctctcattcggaatctactctcaattatatataagacggtaagattagtcaactcactctcgtcaggtggttaacgtgctagtggttaatccaatccaattacttgttcaaataattagacccatgctggatgtgttcgttcagctcagccccaccttctctgaaactatctcagaaccagtggctttggttgggcactggaagtacataaagaagaagacatacatgctgtctcagggtgatcgtgggtctctagccaggagtcagatgacatcaccaccatcacaagctggtgatgccagagaggtatgaatggggaatagagttgaaattcatatggaagtgaccagtggagttgtcggggaagttttaaaaagaaaataacaagtaaactgggttttgacaaaaaataacatagggatttcttttctgcatgtgagtacatatctaaagtagaaaagtataaaagttaaaaaaaatacacaattacttggttcaggttaatgcccacagcccagaagaaggctcagagccttctctgtgagtgtaaagtttatccaagccaccttggacaccatcacattctctgcttaagcaaagctgcttgtcagaggagtttctgcatattctgaatattcagggactctcctggccctacaggtggctcaggaaaccctagagaggaaacgcatcctcattggtgaaaggatctcacctggcttttgccgagggtgagcagtgtagagggagcataataaactctcatagacaacatctgatttccgacagctgtcccacttctgaggcttcgtgctctcagcgccgccaccgccaatgcaatatcctccagtttaaggttaggtaccagaaatatttctgccagaagttcttgatgtaatcaaaacgggattttcatggacttgcgtaattttaggatctgggtgaagaagccttacccagccccgctttgagtctggccctcagtctgtcacatagtgaaacagctcgacatctgactttgaagccaggttcttgggtcagttcctacctttgtgtatgtaccaaagaactccttcaaacacttcctttccccacccatctgtccccacagacatgtaccccaatgcccttaacttgttcctaaatgagtaaacaaagcttcggtaacatataaacatgatttatgaaaacaaatctctccccaaatctgcttagagaagcagtgtcacataactgtaagcaaagatgaaagaccacgattaacagggtccacatctgttcgggggaggatgcagcttgagtctctgccagcctctacctcaaagaatgtgtgcgctaggtcaataatgaaactcgtggcccatctgtccttccggtgtgccctgcactgtgctaagaacttcccatccactggatctcacggaggttcacagtcatctgaagagggggtcctgtgttcacctgcatcttgcaggtgagtggacagaagtgcggaaagcatgagagctagtgcagagaagagctggggcaccagcagtaggactggaggcaggacattgtctttggttactacctggatggacaaactacatagatgaagattaaaaaaacaaacaaacaaacctgggcctgatttatcaaattgggatgtctccattgatccagttgcttgcatcatgtgttaattctcttctgttctctttctcatgtaagcaccacctgtcttccacattatgatgcgaagctgaagattcaccccactaggtcaatggggacactaattggggaatatttgaggtgcagagaggaggtagatgctacatcctgtgaacctcagtaagggggatgcctctgtgtgtagggatgtcaaggccctggccccgtgtcatccccagataagccccatatcaccctgggagctctgcaaggacagaatccatgtgacattttgggaacttctaagatgctaatcagaggccttctcctctgagttctcaaacaaatgagaagtagacccaagggtcaagggttgatgaaaatagcatggttgtttgcagagctggattggatctgcagagagcccaagcctccctgtcttcctctgtctagtctccggccactgacagagtccaggcagagacagaaccaggccgtagacttgctgtggggaaggatatctgtcacatggaagcagaagccaacagcatctttcccctgtggtccctaaaggaaaaattgaggcagaccacagggaatagcaactctttcgtagcttaagacacccatggacatcttctcatccttcccagcagctgtccttcaggaaagagggaatggagtgggaattttccccccaatactttcagggaagaagtcatcatttgctactctctgaatgtttgtgctttttccccaaattcctatgttgaagttcacccctaaggtgacggccttaggaggtggggcctttggaaggtgattaagtcatggagatggagtcctaatgcacaggattggtggttttataaaagaggcccaagagagatctcttttcttttccaccatgtgagaacacagcaagcagtcaccgtctatgaactagaaagctgattcaccagacaccgaatctgccagcaccttggtcttggacttcccagcctccagaactgtaagaaataaatacctgtcatttgtgggccacccagtctatagtatttggttatagcagccttaatggaccaaaataccattcctgtgcccatcagcagcatgaagaataggaaatgatatcttcccactgtaggtgtcactgttgacctccatcacaccttcttgcatccacacccttgctgtggcctcatcacaggttgcatatgcttccttaactctgagctctgaggttggctatgtgatttacttttagccaatggaatgtagatggagacaggagggtgccaattttgagatgaggcatttagaagcccttgatttcagtagaccctcttgtgcctctggtatcaccatggggagaacatgccccagttacctctctgatccaaaaagtgcgagagacaggtggaaagagacattgtagacaccctagcaatcccagatggagagctgcttagtcaagcccattctagatcatccaagccccagccaactcatagacacctgggtggtaatgcaggattgctgcttaagtccacaagttttgggctgtctgttatgcagcaacagcaaactcataacacttacctttcatatttattttggaaccccccagacctagcaaaactcccagaatagtgtaggtgcccaaaaagtattcgttgtttgaatgaattaattaaatctcctttttgtaaaccaactcatcataatgtctcactaacagctggtatacattgcagtatttatctatgtgattttggaggaataatttaaaaaaacaataccaaggcaagacagtaacctctcttgatacgagctgctaagcatttaaagtcctaggagtcagagatcacctggctatcttcaacatcacctgcaggcagctggtgcatcacacgccatggtgtgatgaagccatcctccttcacccctgtctaaactctgatggggagaaatgagccaacatggccatgcatttatctggagtcaatgctgattctaactccatggccacctttaccctcaggtatgtgagtcccatcagagaggttgccagtatgacatcagatccacttttcctcttatttttcagaggaaatgttccaacacatctgaggaaacacatgccttcccagactggcctgttgctgtttcccaggagctgcattctggaaggtggaccatcaggtggaagaagtattcttcagagagctgccttcccaagggaatggtgacagcttgcgcttgccggggagtcctgctgccttccgaggtgtgaagggaaggcatgcactgtgcatatgctgtaccatacagttttgcctacaactgcttgtagcttcattgtagctgtgaatgctccgttcctctccttttcacccctgaagattcgcgaacatgcaggattgagctgtgcgaggcatagcattccccacatggtagacgaaggcggatgtgggtctgatggctctactgccgtccacccgggaggatggacgtgtgttccgggatatcagagcttgcggctgaccagcccacatgtccatgcagccctcccgctggctgtgtcgacattttgggtgtcactgaaggattttactggtgcagactttacaaaggcaaaattgtttctcaaggaagtggacatgaaagatctaaaatcagggctgcttaaaaaaagcaagcacagattaatgacctatctacatcctacacggttttaggactgcgcctagatgggcttaaagaccctagcctaaaaactgtaaatgtgcttccgtctttgccctgtaggacaagaaagccttacgggcttgcttctaactgtgagaggaggagaggccaggaagggagagggagaaaaggaggagaacaggagacgagaaggaggggagagtgaggagaggaggagagaggcttgtcaaaatctttttagtgcacaaaactaattttgttcatcttggatttggtgagctgggtaatattctgtgcacggctcctaaatgaattattaaatgtcaactcaagatggcttaactaaaatactcaatttaataaccaaaagtatctaaggtaacaacaacaattttgcaggtgattgtagagttgtcaagtcaaaccattatagacaagcatttggggttttcacataatctccttccacatctcatcttctgtcactaaatacccactctggtgagcatattccatttcaataaagatcatcgcttcggtgccagcttctttttattcagatcgagccagaaaaccttttttttttttctaaaatataaagcaaaacaagatctcagtcacaaccaccaaatctttattaatgcattccttgtgctacttctgaatattaataaaaattaataattaattttgcctttggcattgcaagatatactagttttaattagtgtactgtactcctatacaattaaaaaataattgatgtccatgcttattggcggtgtctgtgatcttcctttctgttgttgtcaacaaatgccttaaaaaacaagtttcaagaatgttgtgctgcccacttgatttacacacccaaagtaacaggcaaatcttttatgatgaaacagaacagttttctgtttaaattatacacaagtatattaactagaaagagaaaattaaaagctgatgtctacaaggaataatggaaagtctataaaaatgttttatctatcaacaaatttgcctggaaaatatcaatgattggcaccatctctccgctgaaacatggggaggccatcttggatgtgttatgtcaattccatcaagcatttaattctgacgtcctccttaatcagcttcagttatttaaattcagcatatcatgttactgttctactacatcattttaattgtgccatgaactactttattatagaatgctaaagtatttccctgtgcctccttcttcctctgaacaatgccagctgtagagagacagcccatggtgaaaggagggaaattgctttctttgaaaatatttgtgtcaagaatcttgcatagagagagggtggtggttgttttagcaagaaataattcaaatcccacagcacatatttcttagttttctttctttgaaccaggatttttattttttatgaaatctccattgaacaactacaaatgtatctgtaataccaagaggtaataggctaagaggaaagagacttaggaaaacacatggcaaggaagaaagagtcaatgtgagatgcagatttcacactttaccctggactcactggttaataaggatgtttacggaagaaaaatcacaaattgatgcaaatttttatcatattcatgatcttaatagcaattttattttttaaaaaatctactctaccaaagtatcagtcctaaaaacgtaatctttggtttatttttcataagagaattggcttcagagaacctatcacaatctaaaatcatcttgtccatgtgtctgtttacttgttcataatctgcatctcctcctaggtccaagtgcatgagtcccggtgcctgactgtccccttcacagctgcactcacagtgctgagcacaagctctagcagagcactgacgtttcgcaaacatccgtggaatgaatgtattaattctgactcaaaataatttttttccctccccctttctagagtcttctaaattttctttttccatgtccatcaaaatgtgaatggcttaaccagctgtggtctaactgtaaaatgtctattactcagtgataaaaaataagccacgaatacacacaataccacatatgagtctcaaaacaatgggttgagccatataagccagcttccaaggagtctacgctgtaggatctaatgcatatggagttgcagagcagggaaggctaagctatggtgagagaaatcagaacagagcatgcttgcttctggagagaatctccccaaaaagaggcatgaaggaacactccggggtcatggaaaagtcatagagcttgatcaggctgatgtttgcatgaatgttatgcatgaaactatacacctaagagctgtgcatgcatcctatgttaattatgtcttaatttttaaaatcttagtaacacattttttttctagttcattggcaatggaaggaggaaactcagaatatgaatacagttgagaggccctggaattcctgtttccatatcactacctccctccacagattcagggaacagtgctactaagcagcagggttgacagatgttctcgcaactcccctctgccctgatgcattttcctacctggtttcaccccacccctgggggctgtaacaggtctctctcatgcacaggtgatgaaagcaggggttccttcattgcaagcacgctgtcttggatgcagggaagcacccagctctctgccagaagctgtgaataacactcttaacagtccatgcaaatgctgtggtctatgtctgcatgcccagctggtctgctgatcaatttttacttctcaaattgggtcagtgaaaaaggacagcgctttctgttcctgcgatctaaattctcaatgtgatctaaattctattaacactggggaacctgaaaattccaaagcaagcctttagcctcactggggccacctttcagaaaggcccattgacctattttctttttaaactttccctttcttttaattaaaaggctcaaatttcctagatgttaatcaaagattagcttgagaattaaaatgctgtgcatcactcagaaaaagaaccaagtcgaatggtgaacaacactcctctcctaatcagtcctgaaccacctcggaaggaccttctatgcaatttcctcgtgtctgtgagaggaaccaagacaagtgggaaggcctcctgctattgtgctctggtggggagatgagctgtggatctggggcagcctttggggattctctgttgtcttcctgtaagaattggatcttctcctctgactgcacctgagaagtcctgattttctcatcctgacttttcttctcttttcctttactcatgggtaatgggtccatattcgaccaaagggtctaggcatcgcagctggccttgagcttcctggtccactgtttttgattggctcctggggtgcattggagacctgcaggtgtctgaactgccaaagtgagtcctacacctgggacaaacgctcttggtctgtccagagctgtcccttccacaaatctgtgtctcttgttgtccctcaggttcacctaggacagcctaggtcatgtctcaaggatgttgaatggtaaacaacacagaccccccgggcagtgcaggcctctgagaaccactttcattgcatgcaatgtagggacattatcaggtaagagacgagatgctgcctccagccagaggcagaggatgtcagggacagtgtgtcccgcaagagtgaaactcaggctgcatcctcaagggagggatagtttcaggtggaggaggatattctgggctccgcgggcaaaggaatattgtctgatgagagaataagagctgttttctgaagagcagttcttccctgaaattcagacattcccatgctggcttcacgtgtgttgccatttcatgtcccctctgagcacatatggcctccccaaagcttgctgcagttggggcagacaagagagacacacggaaagctgtgggcggcaacagccaccaagcacatcagggaagagcatcaggcggttccactgcacgtctcaggtctgcccactgctccgtctctgtgccccatctgtaaatggggtgtgtggggttggactcagggagttgttgtgaaggctaatgaggcccattgcaccctgtcccttgacatgttgtaaaggctgaatgcatgatagctatcattaatcgttttctaggttagaatcaaaggataagaatatttgtcttaaataaaaagccaccaaagggtgacttttaaagaacaagaaacaagcactttgggaggctgagacgggtggattacttgaggtcaggagatcgagaccaggctgagcaacatggtgaaacccggtctctaataaaaatacaaaaaaaaaattagctgggcgtggtggtgcacacctgtgatctcagttactggggaggctgaggcaggagaatcacttgaacctgggaggcggaggttgcagtgagccaagatcacgtcattacactgcagccttggcaacgagagcaaaactccatctcaataaataaataaataataataattataataaaaaataagaaacatcaaaaagtcacagaatcatataaccaggccactccagtccctgttttcttttctgtcgcccagacctgtcctcagtcagctctgccttatcccgaccgctgagtcttacctgccctctctcagagtgcagtgtcctctgctgagcccgtttcagtcaaagtcacctttaaggaagtttgtgttttaaaatggacccgagatcaatgccccaactgcaatactgtttccaccacagtgtagtttagtacatgcccctcggagacctcagctttcactgctcccccactcccatgtcaccaggggcgaggctggccttctggagtctgcagctctgtgagtccccaacagggtggggcttatttagcgatggcatcaggctgcaatgtaggctgaaacacacctaccacacactgcgtgtgcagaatgctttcacacgcattaattagtatgcgagctctcctctgccctggagatgaagggttttttttaggaatgtatctcattttgctttattaggtaataaattctttaagactggggacttggtcttatccttatgatccctcacaatacctaagtgtcccttgtgcattttagatagtcaatctgtcaatatatattttattttattgattgattgatggattgagatggagtctcactctgtcacccaggctggagtgtggtggcacaatttcggcttactgcagcctctgcctcctgggtttaagcagttctcctgcctcagcctcccaagtagccggggctacaggtgcgggctgccatgcccagctaatttttgtatttttagtagagatgggttttcaccatgttggccaggatgctcttgatctcctcacctcgtgatccgcttgcctcggcgttccaaggtgctgggattacagatgtgggccaccgcacccagccttatttattttactttatttttccataagttactggggtacaggtggtatttggttaaatgagtaagttctttaatggtgatttgtgagattctggtgcacccatcacccgagcagtatacactgcaccatatctgttgtcttttatccctcacccccttctcacttttcctcccaagtcccaaagtccactgtgtcatccttacacctttatggccttatagcttagctcccacatatcagtgagaacatatgatgtttggttttctattcctaagttacttcacttagagtattagtggaaacaaagttatctgtgtgacattttgtttcactgctcatcctcctcccctcaattagactgtaggttctgggaggtcagggattgcatgggcctcagttcttaccacatctctgaccctggcatagtgcccggcatacagctagtgatcaagaagtagtaaatggaaaaataaatagtcacattcaatagatatgaatatccagtcttctcttgagtctgaaaaccaagtggagctttcatgccccagggtgttgacacctcgctgattcctgcccttgcaagtctcccaggaaagctaaggttcccactgccctgtgtccataagttgtcttgtgtctgtctctgctatcacactggatactggaactgtctcccatactaggcccagggctgctgggggacaggggctttgtctgcatgtcacctgagccatacagtgggtgaccctagcagttatcaataaacacttgtttcaaaattacggatgggtgcggtggctcacacctgcaatcccagcactttgggaggtggaggcaggcagatcacttcaggtcaggagtttgagaccagtctggccaacatggcgaaaccccatctctactaaaaaggcaagaattagccaggcatggtggcacacacctgtaatcctcactacttgggaggctgaggcaggagattcggtagaacccaggaggtggaggttgcagtgagccaagattgcgccactacactccagcctgcgcaacagagtaagactctatctcaaaaacaaacaaacaaacaaacaaacaaacaaacaaaacaaattagtcttatcctggtcacggtggctcatgtctgtaatcccagcactttaggaggtggaggcaggaggatatcttgaggccaggagtttgagaccagcctgggcaacatagtgaaaccctgtttctaaaaaaaataaaaaataataaattagccaggtatggtgatatgagcctgtgcagctactcaggaggctgaggtgggaggatcactggatcccaggtggtcgaggctgcagtgagctaggatcaagtcgctgcactccagcctcagagacagagcaagaccttgtctccaaaacaacaaaaacagttcatctcatctttttccctacccaccctgctaacattgtggacctggaaatgggcttaaattctgatctaccatcaaggtcacaaaggacctgaatttcgtttgccagccttcctcactgctgcctttagagaaggcatccaggcatccttcattctaggggacttcacgccatcagcactgtgggaacaccctcaggaaaggggagcagaggcctcaaggggttttttctgctctgtcattcctctgctgtcagatggagctcgtttccagcctagtccactctaggcctctccttggactacacagagagacatcaagatgagagctggccccaaatggggttgaatgttgtgtgtgcttaactttttgtgtaactggccaacatgacatgtctaactatacaaatggaaattttatgatgataagatcagtagttactgagatatttatgtgacaagctgacagatataaaactacaaagcttgcttttatgcctcccatcttttcagaggaaaaatataaataccgagatgaggggtcactttgaggagaatttatgatctaaattacctaatacctggtgaacttctaatatgcatgatgaagtctgtctatggtattaaaaagataaacttcatgtcccaagactgtagcaaataaattcatcctgaagagggatccaagtatctcatcttctcctaccccaggtaaaaacccgaaaaccctgccctggaggaagggattttcaccaggttgcattgcacaagcatcttcccagcctgggtcaggatggcctcacgtggtcatcaaacattaatccattctttggagagaaatctaagtcctgaaataattgtgtgttgataaaatatagcaataaaatacaacattcccttgccactgcggagtgcacgtcaaccaagaaaaacagcagaggaagctgcgggacacgttgtgggcactgcggctgtggctgctgccagatctgtccttcagtccaggtgacaactggcaatgcaacacctcacctgcgcacctggggtcagccttctctccatgcctggctgctgccacttttcctgctctgatgggcatgggagttgccaggctgacactggtggtgtctgggataagcccttggcagctggacaacctgggctttcttgttgactcggtgccccttgttaccacttctgaggagtgcagccaagccccggtgccatgagtgtacctctgtgccaagccatgacctggcactctgcaagcctaacttcctttcacactcacaggtgctttgcaagcggaggcaccactcatcatcctcatcaccagacaataacgagagcctgggaggaaggtgagggagccctgtgctctgccctgtcggtggttgggaaggctgaatgaagcatcatgctttgagtcactaaatgtcaccttctcatgctacttactcaagattgcacagtcctgatggggctggtgtttaaaacccagtctccctatatgcacaacctcaaaccctggctgtctggggaacaggaatagattagaggtggacgagacagcaagtttctctcttgttttgtagttgctcctttacaatagtgtctcttccagggaatcatggagtgtcagagctgagtgggctcattgctagacagagacatggaactccagagaagaggggggcttctccgaggccacacagcaagatggtctgcaagggaggccgaaagcccagctcccttcaggccctagaccaactttccactctgcctcctcctgccttctttgaattttatatttcacttcgttaatgccctgcctctgcccagcgcgttgtcatggtttgattattttaggggtgtttgcagggcactaacctttcccctcagtgtgtttgtgaattcattgtgtaagcctgtgtgtgagtgtgagctgcgtatcaaacccaaattaaactcttttactgtattttatcctatcgatcttctgtgtactcctcagcaccgtctcatttaaataaaacttccatttgtaacaatcctataaatagaaagtcttattgatcagggccccaccggcaggctgcactttggttatcactgaagcctgaccggttaatgcgagggatactatttattatgcagcaagacacaaggcaaggccgtgccatttagatctctaaacagaagcgtgctcagctccagcaagaagatccaatggggctgtccttgggatcacaatttgctcttcattcgccatttcccaaccccagatgctcaacagggttggccttgttggagacatacttgccccagcctgcatgggagaagtcaattattcaccacggcaatgaagatgttagttcaggaacattacaaaagctgggttctggcctcatgtggcggctcatgcttgcaatctcagcactttgggaggccaaggtgggaggatagcttgagctcaggagtttgagaccagcatgggcaatatggtaaagcaccatttctacaaaaacatacaaaaattagccaggcatggtggtacccccctgtaatcccagctacccaggaggccaaggtaggaggatcacttgagcccaggaggaagaggttgcagtgagccaagatcgtgccaccgcactccagcctggacaacagagcaaaaccctgtcaaaaaaaaaacctgggttcttctccacttggaggtcatgctggggaaatgtgagtgggcttgtggtcaaccagaaatgttaaactaaccacattgaagtgtcaagattctcagcagtactaaatactcactatgagcaggacatggttacctaggagtggaatttctttctgttggaagctgtgctttagatcatgcagctattgctttgctgaataagccactaaccattgttgtcatcattctgctgggcctttcttagaaattgccaataacgccaaccagtgttcccaaaaggtttgcaatcaaacggcttcccccaaatccgtggaagccaggcataagtggaatgctgggctactcatggaaataaggtcacatttatgctacaagtggagaaatttggcccaaaccccttgcttgctcccaggtgccctgctccctagccaggctgaaacttcctgctggggcttgcctgtgtctgaggctccatgctgggtctgctgacggatggacctgtggatactgaacaccgtagccaacaacctgaatgctggatgtgctggaaactcacttccaccagaatgctgcagagacccatcagagaagctggtctctcattccagaccccaaagcctccaggactgctggtttcctgtgccccatctgccaatattggataggaagccacctttcaagtccacatggcacagcaggagctagagtgtaacgttccttggttttgtctttggttttgtggatctccccttgtgtccttagctgtctgtccctatttacagcaaagagaaggtgatcatgttaaggagccagtccagtgtcccctgccactgggcacttatgttttccattagatctctcctctgaacagaatgcttgacaggtatctccggacacactagggtgagggcttgtttacttgctacatggcttcagggtaactgggaaaagacctgccatcagacatgggggccctgacatgccagtatcaacaggaaacatccctgggccattggtgtcacacagtagcccaggttcacacacacacacacacaaacacacacacacacacacacagctataagcaagagtatctctttctgtgcacagtgcggtctactgctagatcagaaaaaataagcacaaggacacttctttccaaagcatcaacatggcctacagaaactaagcggtctgaacactcagcctaaaacatctgtttcctcgggtttatccaggaacaacagttagaactttcatgggtacttgttctatatcagagtaactaacacgttcattcagagaggtgtcccaggaaagagaaaatatgtatcaatgaagtaatcgcatctcctttgtaactagttgaaggcaaaaataatggtttttccagttacttctgggtctgtggaagttaaaaaatcactcggcccaagttcctgtggggacactcggcttccaaagtgatctctaaactctcatttatggtcctctctcattaggccagatgctgaacttgctcatctgttacactgcaatctgggtcttcataaggtcttttttactgttaaattttaataacttgtgttataggtaggatagaaacaatatcttagtggcatttaaaagcaaatctattaaatttgagggtaacggcattacatggctagaaacattatcatttcaatcttgcgggggaaaatggctaccatacgagcgaaggaaaattctgtactttggaaaacacaatccaagtctaatatcatttgtgagaaggaaattctttgctcattaccagggagattgtttttatcttacctagaactaaagttattaaagtttgagaactgtaaaatgcttaatgagaaactgcagaataaattagagcagccaggacctgcgctggtatttgccgatgataaacttcaaatctcgattgtgggatagtgccttggcttacccagagccccccttgtgagtgtacaatgactaaatggttaaacggagcagtaaaatattaagtaggtaaccatggaaaccatgatgctgtccagtgtggggacataccggggagcatttcctgttggattcaagggaggcgttgatattcctgccaaaagccagggcagcttgacccatcttctggacttgcttcactatcctgcccctgtatagaccctgcatgcgatgaagaggagaatgttctggcaggcacagaaagagacgcagcagcttgcacacgagacaagcaaagagaggcacaaatgactagctgcagaatattgccacctgccaggagtgtccaccgggccccccaaatcacacagctgaggaggttcaattgcagctctgggcatctacaaactgtaacaaaagtgccaatatgattagccaaggagaggctggctctttgcttctttaggggaggggaggtggaattgttcactaatctcctctgcactgggcccaaggactgttccatctggtgttagctccttgggaccgtgaactgtgtggtctacttgccactgcacatgataggttaccttctactaaaatgtcccttgtcctcccggagtcccactttaaagcacctcctgaacactgctgtagatcactggttagaccaacctgaagagcattttaaaaaatattcatggccaagagccacactgggagactcccattttattagtttggagagaagatggatatccatgtgttttaaaggctccttggcacaagccaagggctctggctgagaaccatgaactctgaccagttgttcataatctttactgcacatggggctcacctggggagctttaaaactactgatgtgatgcacgagtcccacccccaggaatgctgctatgattgttctagggtgtgcaatcgggactgagacccattcctgccttggagggtgggccctgagccagtctcaacattcagggaagaaagaacagagagtgcctcagtgtctctgggtaaagtgcagggtgttgcaattgcagagaggggatgctggttggttgcaaacaggcacttggacctgtgaggtttcctcagggctcttgcagactcttggagtggtttgcatgcacttggtaagagtattaaagcaccaaggggtcatatagattcccacccgtgtttcccaaagtcccagagtagagaaaaggagttactgactgctttctgcactttctgtgggcacagaagctgagaggggctggagtcctagtgggggatggatgagtgttaaggttggaaaggtgtttgaggatcaggagtgaagaaccttgaatgtcagggtagagggatctggctcttattctataggcaatggtgcatcttggaaggatttggggcacatcagtttgggacatagggaggggaatgtgctcagagctgagtttaggaaaattaatttgcagggataagacttgaggaagacactagaacgaagagatgttgactagaagcagttataacgggtcaagaaaggggtgatgtttgtcatcctttccttagaaagaccaagaatatacacttggtgttgttcagggtctatgatccctcccagatctcacttggtatgaaggatggaattctgttcagacaaaggacttgttcaggccaaagagccaaactggtcccacaggcgtgtgaatcaggctgtttgagaaggactttctgaatggtgtttcttatggaaaactggaaaacacacttgccagcaagtattccaattcaaaatactaaattctgagtcagcctgatacctccccctgggtgcatttgagctccaacttagagatgggcactgcattgggtgactccagttctcttgctacccgctcctactccttgacagaaggtgatatggtttggatctgccttccaacccaaatctcatgtagaattgtaatactcagtgttggagttggggcctggtgggtggtgagtggctcatgggggcagcagtttctcatgaatggtttagtaccacctccccactgcccttggtactgtatagtgagtaagttatctcaagatctggttgatttttttttttttttttgagatgaagtctcactctatcgcccaggctggagtgaggtggcatgatcttggctcactgcaacctctgcctcgcgggttcaagccaattctcctgcctcagcctcccgagtagctgggactacaggcaagcgtcaccaagcctggctaatttttgtatattttttagtagatacagggtttcaccatattggccaggctggtctcatactcttgacctcatgatccacctgcctcggcctcccaaagtgctgggattacaggtgtaagccaatgcacctagtcgatctggttgtttaaaagcctgtaacacccctcacccctctctcttcctctggctcccgctatgtgaaatacctctctccctttttccttctgccatgattgtaagctccctgaggccccttgatgggtgcttccatgcttcctgtacagactgaaggaccatgagcctattaaacctcttttcttataaattacacagggttgggtatttctttatagcaatgtgagaatagactaatacaggaggcatcttcctcctagtattttgtgtctttcatcttgttctctccatatacggagtggtgtggggaaaacccgcaacgaggtaacgatgggtggagaagaaggtgccaagagaggcttcagatctcttagccactcaaccaactctgtccactgatggcttggatgagctgggccctagcaagctcaggaccagcccagggagacttccctgcacccctccctccaccacgcagaaagtgtaggccctcaccttccacccctggcaaccccttatgtcccccttctgcttacaagcatgcaattactcacaactccaagcccaagagggggttggggaggggaacagctctacttgcaaattactgaagattgatttgcatcactttcctttaattatgtaagaatgtgttagaaattattaggtaaaaatttgatgtaactcttcttcaattaaacacagtgatggaggcaaaatctctattagtgtgcaaattccttgggagagcatcttctccgcacagcggaatgtctattagctttctgccaaaataaaggtcaccagacgggagccttccccatcacactcttacttccatggacatgcagtgtaatcaggcaagatgtgtcacactcaggaaaccaatggtgccattatactgaatatacccagtgcattacaacctggtcccctgttccctaaaggtgctcagaatctcatagatcctggagactggcttaagagaggggaggacagatgtttagttccaagagctggagtttatccttcctattgtcctgattaaaggaagaggcaaataatcccagtgcctcttgaaccaccccaagtacaagaagctcactgtgggtgatgtaagctgcaaagaatatttagagggagagggagagagagagagagagagcctcaatccacaaactcagagtgcaagaatgcaaccttcttcatttttctgcaaaaacttaatgcttactttgagtcttcattctgttgtgtgacaaattaatatcagattgttttcagttcttgtccaggattggtgtaagtttcagaaatttattatgcacagctaagtggctgacagaaggaggaagggttcagtgcttggtcttcagtccatgctggcatccaccaaaaagtgcatggttctgcctgattcttggttattgatttcagcaggccacagcttgcagcatctcacttatcacaacagaaaataggatctgagacatatttgcaaatgggtatttctaagagaaaaaaacaaacacatacacacaaccgtgggtacaagacacctttggactcagctagcccagcatctattatccttaattctggtaagatcacactgattttcttttgggagactagcccttctcaactctcagtctagattatttgagtgaaattgactctctatcttaggtctagaaggggagacgtgacttagccaaccggcccgttttgtcaccctagaacttcaggattgtccatggagggtctgcccctggaacttggctagaatggctttggaagaagcactgtttcctggggagatcactaaactggaaggctcaagctgggaatggctggtggcaatctgccacaggctggagacaacttgcctgagaaagaaagcaatgtggaagactacagagctgcgagatggaaagagacggggttctcaaggcattgttgaagccatccatacccaaacacttttcagttacttgaattggtaatttcccttctctgttcaggctagtttgagctgggcttctgttgcatgtaaccagaaaaaaatataagtagaacactacaaatctaaaagtgaaaatcattccagctcaagaatgacttatggacaggatagatccaggtatggaggggcctgaaactggtccaattttaagaaaaataatacaactttaaaaatacaaaaacaggcacagagcctgggaaggggcgcatgcaaatgggacccatggaatttaagctcctttagcttcattgcaattgggaggcctgggtacttgtctccatttccccgaaaagcctttgataaaatcacttcatctcttaaagtctccatctcaccattgagagcaagatggttgatctcagttaaatttcatccagctcgaaaaacaccatgtctctacaatctttgctgaggaaatgacattgcttaaaattatatattttttgatacttgcttgaataaaagtttctttgtctgtccaggacctgcctgggtgttctgatgctcggaacctctacatccttcttccatgcctcctacctgcgggccgctctactgggccagtgaattcacgacagctgttcatttctgccatcttggtaagcataaggccaacgaggaaaggaaggcagatcttgaaagaataataccaagctattgtactctcttaggaagtgtttcttcctcagctgtctgggcagagaagctttcttaaagaatgttttcatacaaaatttctaaaatgctgaaaatacaataagattaacggcccctggaggctatggcttaaatattttatcttcttagatatcagttacactgcactttcctccaaggatctaaagtcttttaaatatagcatctaattaatcctcctgtcatctctggatggaatagcatcattaccccaatttcacaggtgaggacacagaagctatgggaggggtgtccacaggcagaggtggcctgattccaatcagtagagacctcggccacagcactggtgactgacccaacagggacatcatcaggaaaagtccattcagaagatgacactcacgccctacaccacagagcttatagactacagccagcagtcaagaaaatggtaccataggaggctgggggacatctctgcctcccatacacagacaaggcctcagagagagagtgactcacctcaccaagaagtgacagattcatgatcctgatgaccgcatggccaatgaattacacaatcattgcgtcttcacaaacagaaacaaccactttattaatacagttgttggatcaaaatggtgtttttttggccgggcaaaaaaacaggcccacgcctgtaatcccagcactttgggaggttgaggtgggcggatcacgaggtcaggagatcaagaccatcctggctaacacagtgaaaacccatctctactaaaaatacaaaaaaaattagcagggcgtggtggcgggcgcctggagtcccagtgactcgggaggctgaggcagaagaacggcgtgaagccaggaggtggggcttgcaatgagccaaggttgtgccactgcacttcagcctgggtgacagagtgaaactccatctcaaaaacaaaaaaaggtgttttttttctccccaaataaccagataaccgcacagattgtcatttgcttccattcacctgacacctgccatgtgtatcagacatattggccatgcatgacctctgtttcccagccctgaaatgtacctgctgctaccctcattcagagaggcaggagacagcttaaacaagcttatcaaattggttccagcaagagaactagtggacaacagggccaggattccttccacaactgttttctgcctgccctgtttccttttttaaacgatttttattgtttagatccagtgttcagcaatgtggcccatcactgctggtgaattctactggataacacagcagacggaagctccagaaagagacgcttccacggattataaccatgtcaccatagtcaccaccactgccactgcttatgggaggtcaggtgtggggtcttgagaaggaggagttgaaactcaaaaatcacccaaaggctgtctcaaagaaaggtagttttctcattgtcaaaactcaaagttactcactcttaaatgcttttcctgcctccttttcgaatctaaagcatcaactacatagggaaagtcaggctgctttccaagcatcaaagccaaaagagtctcacttttggcaaaggtaacagggtttaaaagagaaagagagatagaaccagggagagagaggaaccagggagagaggaggctgacagtggaagaaaaggaaagagagggaggggagagagaggagagggaaaggagagagaagagagagagaaaataaaagagagacagaaagagggagaggagagaggaagaggagagagaaagagtgagaggagagagaagaaaagagagacaaagggaaaggagagagaggagggggaaaggagagagaggagggggaaaggagagagaggagagagagataaaaaagagagaaagagggagaggagagaggaaggggagagatgaagagaagagataaaatgtgagaggagcgagagaagaaaagagagaaagggagaggaagagaagagaaaaaagagagaggagagaaagaaaaggagggaaaagagagagagaagagaggaaaagagagagagaaagagcaagaggggagagaagaaaagagggagaagagagaaaaaagagggagagaaaagatggagatgtaaaaagagagcagagagagagcatgaacatgaatgagtctatgtcactgcgacagcaacaacaaaggaaagaaagaaggaaggaaggaaggaaagaaaaggcatgtagccatggaagatgaaatagaaagagagaggaaaatgtggaaagaggtggagaagagaaagaaaaaagaaaagaagaagctgctggagaaaccccagccttgagacgggagcctctgacccacgttgtaaaatgacaaggattgagtgagcggtttttaatacagataatattgtccgtgtagtctataaatataaaattaaatgctgacctctctggtccatgtcaaaagtccaagccagtgtcagcacatattgtttttatttgtttcaagagaaaatagatcaacaacattaacctcccaatgaagagagaattgaatgaattaaaaagcagagccataaatcgcaccggttttattggcaccatgataaacatgcccgaggcctcgcagggagtggggtctaggatattctcaataccctgcagcctctttgccaccaagaaaggaagagagatattaagaactaagaacggggcgctgttctcccacttccaccacctctatccatcaccatctgacaaaggctccagcacacgcttcgagaaaaatattgagaagaaaaagaacctagaaacagggcaatttggagaggccttcggggagccaggggtgcccaagcggcccactcgccagctgcaattaacaagaggacttgtcagggaagagggggaagctgggcgtgggatttccaggacacaactcacaggccatcagccggagagagcatcctgggggctgctggctggtcctctgccctctcccggctccagccctcctcagaccagtgggttatgcacacagacagctgcttgccaatgaaggaaacacactttatttccagcttaagaattcacaccatcacttgggcagttgctaaataaagcaccatttcccttatccatttcatgtggaccttttagcacttactttataatgattcagaaccatttttaattatgaagacttagctgaacacattcgtttacaaagaagagatattcacagacagttgtgctttctgctttgccagcctggcctcaggaagccatgcagaagaaaatttccaggaatttagagtgttcattcctcctgttcacaccccttcttaccttcattcacttcctcttttatggctggaagtctggagctagggtgatgagcagagtggagattgaagaaattctttaaagtccccggttgactttttgataactcccttagccaccaccagcagagaagaggaggactcagtgatttggggaaaagaatcttacatgagagaagtacgtaaaaggcgacataaatcgtactgaaaacaactttcgtttataaacaaaagaaaatgttatatatttataaaccaatggcagaccaattggctagacctgtaaaactcaaaaataattaccctttggaacaaacctacaaagcaaaagattcttcagctattaaactattttcggtaagtcattattttatgaagctattatttgctctaccatctctactgatttagttacagatattttaagtctgtgtctgactgtgacaaaactcggtcagggtgaccacccagttatctgggctcatggacatggtattcttttaaccagttaaggttacatttacttaattagatctgagaagtgttctctttggctgtgggagtatgtgcaggtgtgagcttggcacattgtccacaatctttccaattaggacttcctttttttaaataataaaaataacaataattgtggccagcacacacaggactcatggtgtgtcatgtattgctctaagggcttagcccagataaacacatttcattcccaccactcccctgccaggcaaagcattggctgtgtgtccagaaaacagaggcacagacaggtcacatcgtttgcccaaggttacccaataaatggcagaagtaggattccagccctggccgtctggcactggagtctctgctctaggtcactctgctgtacgcttcttcctttcctgggccctgtctggcagctccctgagtctctcatcatgtaattttaaaggccacatttgtcttttccagcctgtgtacaatgtaggttgccaagtccaccctgcccaaggccgcagtgtggcttagaagaggaatagctggaacttggctggaattgaccccaatctggtcacccagggctcccatcccctgacactctctccagtgtctctgtgtgtcccctctagtgggctctctgggagtcacagtcatgtcagatggtggaggttggcccagagctatttgtgctgaagcatttctcagtactcctcatggaaacagctccttgagatttaaactgcagcatcccggtcaccgggcatagggcggggaaaagggatgcccctctgtcctgcaggattctcgtctctcagtcaccagcatccgtcttttgtccaaacaaaagaatattcatgtaaactgactcaagcacattgcagtggggctggatttcagtttgccagactctcccaagcacttttagattgcagtttgcatgagggatgacatccactgttggaacacgaagcaggtatacccaagtcagtcaacaccatttccattttaatattaacacacacataaacaactcaaacctgtggcttcaatgaactgatttctctctctccagcagcccagttacctgagacatgttggacagcttggctctggtcagaatatatcacccaccatggcctgggacttcagagactacctgccgattcctctatgatagacatttgttgctgtgagacctgggaaaagttgctcagctactctgagcctgttacctcctctataaaaatgggaatttctaaagtatcaacctcatagggcttttaaatgcttttgtaaagcacctggcagagttcctggggcatagtaggtgttcgataaaagtgagcttgtgtatgtggctgatcttcctagtaatgcaaaatgagacacgtcacccatgggtgacaggcatctcccactgccccacatcccaggggaccaaaaagaaagtagctgctgataaatatcacattgctctcaaatgcacctattttgcagaattcttgggttttatccagaggcttgatgtcatatgatttcagcttaatattttcttttttattattattatgctttaagttctagggtacatgtacacaacgtgcaggtttgttacataagtatacatgtgccatgttggtgtgctgcacccattaactcgtcatttacattaagtatatctcctaatgctatccctcccctctcccccaaccccacgacaggccccggtgtgtgatgttccccaccctgtgtccaagtgttctcattgctcagttcccacctatgagtgagaacatgcatgtttggttttctgtccttgcaatagtttgctcagaatgatggtttccagcttcatccatgtccctacaaaggacatgaactcatccctttttatggctgcatagtattccgcggtgtatatgtgccgcattttcttaatccccagtgatcccattactgggtatatacccaaaggattataaatcatgctgctataaagacacatgcacacgtatgtttcttgcggctttattcccaatagcaaagacttggaaccaacccaaatatccatcagtgatagactggatcagcctaatattttcaagcctgttggtaaaacgtttctaacccatttccaagacagccttgggaggtaggtggtctgcccttagagaaacatctctgagaagtgggtctggcccagatgatgtagaatgtggtgcctctgggactgtcctagagggttctgtccccactaacacccagtaaccacacttccttcccaagacatggctaggaagtagcaagtctctacagggtgaacgtcctttcccaagcctgagcatagatggacgatcagatttccaagctgtggaaattcactctgatctgcttcaggcctaaacatcatacctcatctcccctccttgaaggagacctttccataagggcttagagacgtccaaaacaaagaatagaaggaagacctgcaaatcaaacacaaacaaacactatgctggaccccaagccaaatgcgttccatctcagctaatggagccagaaataatttctgttaatttctctgcctcttagaaagagacattttcaattcaggtaagatattgctgagctaaatgccaagatcttagtctcagaccatcgagatccagattggtttgtcagagaaatgtgagtcattttccgggggtgagtgttgaaaagaatgtcaggaaagtggctgtaccagcacaaacctattcacctttccaactactcaatgcccttgcattgtttctatagatgattttctgtttaggaagcagaggtcttgtttataatgatacaaagtgatgagtgagtccatagtgatgaggttaattaattcaggaggtgtagatactccaactgggtaattcaagatgaaaatatggagttcggcatgtgtgagaaataaaagtcttaatctcctttatcactctgttttatatagaagttttattaacatgtgctagggaaagagggcagaggataaaacatccacatgtcagccattttctctgagagactggcaggggtctggcctgtagatcttcagagaatgatgttgaattattacccaccattaggagggagtgttcatttctcatttgtctgggatagaaaagcttcttccataatactgagagctaatagctccacaaagagtagagtttgagttcctaaattaccaggactggctaggaaccaagtctaaactcgcccagctttccacgtctcactttccatttgagcacgagagataccaaccccagatcagacgtcccaggggaccaaggaaaaattaaccaggcatcaggctgctgataaatattacgtcctcctcaaatggatctattaggcagaattctaaggttttatccagaagcttgacatcatgtgaatccatcctcatcttttcatccctgttgctaacatgtttctgaagtactttcaacccaactgaagactgtgtgcccgcaaaatgaagggctcacttaaaaaccagtgattttccttctgctctgaagggggtgcaggcaggtgcatctctgctgccctgtcattatcaggcctcttgttggccctgcaggcaactgagaatcccccactaggggagaggaggtgccaaaggcaggcaggaggtgattggttcaggtattgatcaattcttactcacacatgacctttcacctccctcagagcatggcagccacagctaacgtctgatattcacatttgtaattaaactggaatattaaacatctgcatccatgacaacctgggcgatgatctcatttgatcccccatgcccagcagagagcagctcccagtgagctggagagagagtgcaccagggatgcagcagccacacagcctgctgggcaatccagggggtaggaggctccgttgcctttgcccaatcacactgcactgccaatcttcactgcttgggactggctggaagaatctggatgcatctatgtcaatgcaggagggaaactgagccatagcaatgagcattcactaagcatgctgcatgcccaagaaccatgttattgggccctgcaagtgtctcctcactcggacctcctggttgtacagatgaggacaggcccagggacccatgaccaatggctcagtgatggaaaccagagctccatgctgaagcagagcgttttataccccacaaagcacctcctaattcagtgctacaacttctccacacagcagcctctaagacattggtagggaaggatcataactattggcgataacagactagaggctcagcggttatgtctcccatttaagccctctacaggacactcataatttttaaaactttgcatataaccaaaagacaatgaagtagcaagacaaggtttagaaataatggtatattttattttttatttttatttatttattctttggagacagagtctcactctgttgcccaggctggagcgcagcggcatgatctcggctccctgcaacctccagttcccgagttcaagggattctcctgcctcaacctcccgagtagctgggagtacaggcgcacaccaccatgcccagctaatttttgtatttctaatagagacggagtttcaccatgttggccaggctgctctcaaactcctgacctcaactgattcacctgcctcagcttctcaaactgctgggattacaggtgtgagccactgcacccagcctagaaattatggtacatgttaaatatttactttttacaaattaatatctttaacacatagatgtaatatttttgtgataactgggatatttattaaatctgtaatacataagtacattacagatagtgtgggctggtgatggtctcttgcttaaaatcagcgtgacaaaaccatctgcatccgtgtgtaactgctcagactcaagtggaagctgagccagacctttgtatgtggaaagctctggttcaaatagcaccaggtctgaggtcccctaacccccaggcctctgagttttctgccattccagagcgttcaagtgagcaaatgttcaggtggacaattgtatgcctgacagtgaccatggggaggggacgtttctctgtctacgcacacagcctggccatcctgtatagttaaacagctcttgccttcttcccaaagatgcaagagttgattgctggagatttgactgacagtttataaggcattcttggatgcatcaagaccaaaggcatctataaacataattcaatcacatcaatttccattactctatgtgaaggagcactcttggggaaggatgtgctccaaactaggtcattgctcttcacactctggaaggtgacccacaggcagcagtgtatagatcattcatgacggtcttggcaggagaccctgaaggagcctctgaggacatgagcaagaggcagaccaaggactcttgcctgggaagctttgcaaaggacatctctaaaacttactggagatcagtcacgttggcttacttctgcagtgccagcactttgggaggccaaggcaggaggattgcttgagcccaggagtttgagaccagcctgggcaacatggcaaaaccttgtctctatagaaaatacaaacattgggctgggcacggtggctcatgcctgtaatcccagcactttgggaggctgaggtgggtggatcacgaggtcaggaggtcaagaccatcctggctaacatggtgaaaccccgtctctactaaaaatacaaacaattagctgggcgtggtggcgggcgcctgtaatcccagctactcaggaggctgaggcaggagaatggcgtgaacctgggaggcagagtttgcagtgagctgagattgcgccactgcgctccagcctgggcgatagagccagactccatctcaaaaagagaaagaaaaagaaaatataaacattagccaatgttgtggtgcacacctctagtcctagctacttgagtggctgaggtggatcatttgaacctgggaggttgaggctgcagtgagctgagattgtgccactgcactccagcctgggcaacaaagtaagaccctctctctcaaacaaccaccacaacaacaaacttacttggcggggagcaagggaagatgacaggggtagaaaaacatatgttgtctgggctgtccaacactcattttcccctttcatggtcactcaatacatatatagtccttggggaagcacctctccctttctcttggtcctcatcttttgtatgggctgtgtctactctaggcttggagggggccattcagagcattaacatgccccctacatcacagacgcacgagtgttcccatctccaagaacttttcctctagtgccttgttcccagccagtgacccagaggactaagtcatgttaatttacactaaaatgttagtgactgaagagttccttgttgtactttagacagtacttgattgtcacagggtatttgaaagccatggactttgttatcagatcctgtcccaacttcccttatagtggttatttggccttgaacagaacaaattgtttaaccttttttggccatagtctactcctttgtaaaatgaagttagtaatatctacctcttctgtccttttgtgatgcagatatttgtaaatagctcagcacagcatctggtccacggtagcacccaataaatgaccaatgtatgatcagggttggagtgggcaggaagaggccttcatgcattcatgagtgcttggtgtctgcagcaatacctgccaatgctggctgtgggcagaccacccctgcgcctcatttgggaccctcaccagggtcaggattaatgtcacttctctgcatggtagttggaggtatatttctcccctgaaacccctttgaactttctgattagcacagagaattggcacttgagctggcacctggagaccatggcaaggcaagaccatgaaggcaaggtggcaatgaagtcaaactggtgcagcagaaagagcactagagtgggagtgtggagttctggccaactgcctccctgtctcctgctccctgaagatgctggtcatgtcattcttttctggttcactttcccctcacatggctgagatgaggatcctggggttgtttcataaactgaataagttcttgctcacagccaggtcaggaaggctgcagatccagaccctcctctgccattgttagcttccaagggtagctccagcatgctttattcatgagccctcatgttgatccaggagtttgcggagatgtggaaattagggaaagaggtaataatccactcaggtactgttagggactgaatgtttgtctccctgtcaaattcctatgttgaaattctaagcccaagagcaatggtatttggaggtgtggcctttgggaagtaattgagggtagattatgtcatgatgataagagccctatgatgggattagtgcccttataaaaagagtaggacatgggatctttctgtctctctctctgctttccactataggaggatccaaggagaagacagctgcctatgaaccactggatctgccacttccttggtcttggacttctcagcctccaggacagtgagaaataaatgtttgttgtttaagtccccaactatggcactttattacagcagctcaaactgaccaagacagatgcacagaatgaaattctccaggggaacatgaatcatgtccatctgaccaggagctaagtcacagttctgaagcataattgggaggaggaggaggaaaacacctttacctacacttaacccttcctttggggttcatgaaaggacatttattgcacatatcaggtctacatataagtgtgcatgtatacatttatgtgcatgcatgcagagacacacatacacttgcacacaaacacatatgacacctatctgcagcatgcacaaacacacatattctcccaggctattggaagtcctgctatgagagtaccataaccctgagtgttctcattcatgtcccagatctctttcctacccagactctgggcatctgacactaagcctttcttcaacttccaaattcaatctgctactccaggctgctctgaaatagtgggtatgtatcagttagttcttgctgcataacaaaatgccccaaaatatagtggcttagatgacaagcaaccacccagctcactatctgtgagccagcaatgtgtgctgggcccagcagagtagttcttctagactaggctgggctccctcatgtgtctgcagtcagctgccaagtcactggaagcctgaatagtctaagataacctcagctgggatggcacatctcactctacatggtttctcatcctccagaaagccagcctgggcttgtcaatatggagttcacagcgttccaaaagaaacagagcagaggcacgaaaggccttttgaagctgaggctgagaaatgtatgttgtttttctctgctgcattctgttggccaaagcaaggtacatgactagctgagattcacacagagggagagggagtctacctactggtggaaagaatggcaaagtcacattggaaagagagaggggatggggggcaatgccattttttcaaataattaatcacaggagagatacagcaaagggccctggtgatggcctgtagaattaccaggagtcccaactaagccacacagggcctgggtttcttgcggctccaccctcacaccttccaccccttccttgctgcagtaaccctgctgtttcccctaaacacgcgaaaaccattttgctctgctacgtttttcactgacagttgagaatacttttttttacccatttatgggtgcaaattaatgagatgacaacagactgaaaccaatgacaactgctaatctgtaagcaaaaacaagggatgaggagccgagagcagtgcagctgttttattttaattgaggaatgattttatgttaggaacactcaatattcacagcaaattaaaaataatgaagtgaattgataccaatgattttttttttttttttgcttactttccctttgtaaatctatttcttcacacaaattgacaggtctgattgatacatacgctattattcctcattagtaggctgaataaaataattcttgattaaatttattgcaatttaccaatacagcataatgtttgcaagctataaaagtcaatcaacaggaaagcagagggaagccaatgatattatttcattttatataacacataagtggcctccccgtcctggtgaagggaaggccatcacaagactcccaagtgggcaacacacctcaaagaaggggctccaaacccatgttggttttcatgatcatcagcaggggcttcaagagatcacctctccctctgctgctggcctgggctcgagccatccctgctctcctggcctacccaccctcagctgagccttgcgccacttatgattttaagctgcagtgacttcctggggactggggttggcaatgaaacctgtcacctacacccatcccaatctagctgaatatcagaatagaggctgcctagagagagaatgagagaaggaagccacaccatggcctcctagatcttgtctactcaaggcacctatcttagggcttctgagtcagatggagtcttgagtcctgagtccaactgtcctgctgtgaagtaagatctccttggaagatctgcctccctcttctcagatttcacaccctgccagcaggaaggatgcatctgactccatggatatgctctgtttggcccaccaggatttaaacaagtatataaacctttcaaaacttggagattgcacataaacccctggtttccaggtttctcttgaagatcaggaatatctggctctgtgaaacccctttctgtgtgtaactgagccaagcagcaccccttgggtgagaatgtgttctctactccccattgtctgtcattctgttcccttccttgttttctgtcacctgcctgtcccgaaggtatctaaatctgtgacttctgcagtagatgggctttgagtgcttagggctttaccctttttactgctggattgtctcatggtgactgtgcacctagctggggtgtaatcggatttaataggagatatataaacctatagcaacaccatagaggatgccagacttgcttaaatgcctccactagcgtctctcctgtgctggaggctctcatcctccttctccagttccctattcaagcttttaagttttttaccctgcagaacctcctccaccctcatcaaacacatcccttcggtgtcccctttcccatgatcctggttgttaggctatgaagtaatgaatatcctctctcttcaaggtcacagtgatggggaagtgcctcctggactcctaggtccccaagtctccacttagagcagttctccaatggggataaaaactaggatgggtattttgactcgacagacctttgcggagcctttccaatcagatcctctggaacatagtaggtatgcagtcaatgcttttggacttgaattctaagactaccttcctgattgtctctgatagttccttatccttctcagtagagaatgtttttctcaggtctccacatcctttggggactacaggtacatctgtcctagaaatctctcaggccaatggctgggctggaaatttatgaaaccattgatcaaggaaggttgtccagccatgcatgcctctggcttgtgcagatgacaatgagcctgtaatcctgcaggtcacttgctcctgactgcctcacaataataagaggcccttcagactcccttatagtaataagagctgctaataagtttgaagggcttactgtgggccaggccctgtgccaggcactgcccatctatcttgttcatcctcaccaccacctttgaggtgagtcctgttatcaccatcctttaggaggctgtgcctaactgaaatttctaaactatgcccttcaaactgatgccagtcttgccccaatattcatggatgagaatacatgacagtctatcaacaaataattattgatccctcgataaagtgcaatactatcctgggcacattgatggatagaaaattcatatgagacaccttccctgtccttcaagaacttatcatctatttagggagatgagtctctgtattggcaataagtcaagtacaaaattgttttatacaatgataaaggagcttagagagggggaggctggtaaagtttggagcaatgaaagatggttcctgaaagagccaaggctttagctgggcttaaaacatgggggagaagaagcgcacctcctcccccacgtccctggcacgatctcctgcagctccttcattcctacccagcccttcttggaaggatgttcacggggtcatcagcctcctcccatgcagtcatgataggcaaaattagaccacctgacagaagctgtgaggaggctgtttggcgtaagtatgagagaaggactttctcagaatcagaactacttgttcaggtaaaaatgatgagtttcccatcactggggggtttgaacaagtctgttgtcatctgagaggttgcaaaagggatttgaacatgcctccaggtcccttctcctgcggccctggcattccagggttctgtgaggcacagaggcagcagagatcccctcagggggtgagcacaaaagacagggctgataaggaggtatccctggggccagagaagagatctcaggcacaagacagcacatacaccgccaagtgcagtgacagcagagggatgcaaggcccgggaacatggaggatgctctgctggtgattcccagggccagtacagaagtgtgcatagctctgcaaaggcctgagccctgctggggactgcaaacaggccagcgggctaggcctgaggagggtgctccgatgctgggaaggggacttctcacagacatttccacctgaaattccacaggaacaggcacaaagtacacagctcaagtcctcccaccccagcctcctcctcttcctcctccactctctcctcctccccctccccctcatgtttctctttctcttcctcccccttctccatccctcgcctcctcctcctcccctttcttctcttcctccccctcctccttttcctcttcctcctccccctcctcctcctcttccctctcctctttctcttccttatccccctcttcctccccaacctcctcttctccatctctctcctcctcctcctctttcttctcttcctccccatcccccttttcttcttcctcctccctctcctccatccccctctcctccaccaccttttcttcctctccctcctccctgcctccactccacttctctatctcttcctcctcccccttcacttttctcctccccctcatcttcttccccttcctcctcatcctccccctccttctccaccttctcttcctctccttcctccccatctccactctacttcttatccatctcttcctcctcctcctcccccttcacttctctcctcctcctcatcttccttctcctctttattcccagttccagggaagagctcaaccatatagactcaaactataaacctgggagacacctccacctccttcatctggcaccactgcaccatcccatgcaccacccttcataacacccctaacattcactaagttagtcttctttcctctgccctgtcctggatgtagctcaggccatccggccgtctctctcacaagtgccctgtgccatgcacacaggggactgcatctgtcttttccaccactgtggcctcagcacccaacaaaatgcctgatacaatgcaacaataataataataataataataaccatcatagtacggtcccttacattagaaacttatggacaggcattgtataaacgtcttatgtgtataactcgcataacaattctctagagtgagtattattattaccattattcacaactgagaagaatgagcctcagaggaaccttgcctgaggtcccacagctagtaagtcccagcaccagaactggaaataggtcagctccatctgaccccagagtctggtttcttaattcttaggctgtgatgcctccatgggagcttagtgcagatttgctgattaaatgaatggatcactgcaacctctcagcagtctccttgcccccagctgcgctccttccaggtcatcctccatcctgtagccaccacagtaggtccttaggcatcagtctcttttcctgcttaaaatcttcaatgggcctcaggatgtagcccctccctccctctccatcagtgcctctcttcactgctggtcagctctactgagctgctctaatgtcccctgaatctgctccgtgttgcttcatgtcttgggccattgcacaggctgaccttgctacgctgaatgccccctcctctgttgcaacccatctggagctctctgtgcagaccttacctcctcttacctgatcctatcagcctaaccaagatgcctgtctgttgtgtccctgtgtttcctcgcacttatccaacaggtctgtcatggccaggcactctcgctctctgcttcattaaactgccagttccttgaggtacagggggcattttgcccactctgggctctccattggccagccccatggcttacacataaatgtcagtgaccgccatcaatgcctctttgtgttaatgagctgatccaataaagatatcagtgaacaaagacacaaaaggcacaatttacatgggctgcaggaatccccatcagagaaaactcttcactcttggagagacaacatgaccatgtagatggatgatttcaaccattggggagcatcatgatcgcccagtggactttaattaaagcacagagtcctggaccccaccccagagtttctgagtcagtgggtctgtgaaaggaacagggaaagaggagtctggaaatgtgcatttctagtaagtttccaggtgattgtgatattacagacccaggagccacatttcgagaaacatttcttttagaaaattctagcaaagaacagtagtgtccagtaagactaggatgaaatgcaggaagagaaatgaaaacaggcttctgttccctctcgagggtgtaatgttgcaaaccttactgtaaagccagcaatctgaacaagagcatttaaggggcggccacacccggtccaacgtccgtgttcaagtgcatcccggcctcttgtagaggaaatcctggcttcctatggacacacgcatatgggaatagccacactcaggcccaggctgcagacaccagacgtctgagtgcagggcacaggtgttcctgagatgccccgtacaatgggtcaccaaaagctgactgagtagcaatgcaaacaaagaatgacccctcctcgccggccgacgggagcggctccaggcaaaccaatggcattcccaaacagcgtgaacagggaggaaacaaacagattcatctctgaaatttgatacccgttccagacacaagtagcaacaaacttagcgacaaagctgtcaaaatatgttccacagcctcattggcaagagatctggacacacgaaagaaattcagcaaaaccacatcagttgccaaacggggaggtttgacagtgtgttcgggaatacatttagatcaaaacaggaacacgtccaaaggagcaagtgtctccataaattattatgggatgattagaaataattagtcagtgatttcaaaatattacgtacatttttcagtggtattgaggggacgtgttatacaacgtgggattttgtttttgcattggggttttctctttttttcttattgctctctggcagtttgtaaaaatgggggccatggaggcagtctcacaccatgcaaatccctggggcttaaaagaatacgtttttaggcaaccggattcctttgcaaagcttccattggaagtaacatagcggggaaagagccttgttcctttctgggcttctttgtaagagtcagtctctagttgctgtccctgggttagagtttgttatcaatggggtgagaggatttacattttcaaaggcctctaaaggtgcctgggccagctcctgattctataaggctcagagaggtggagggaggcactcaagctcttgggaaccagaaccaagagccgggaaccagaaccaggaaccaagaaccagaagcaaggctggactccctggcctcctgactcccagactgctatcttgggtcagcagatagcaagaaccagaagggtccagtggccttaatgaagaaaccccactctagggagagttctgtggggcacgtctgttcccagtgctctgccacattgggggaagatctcttgtccaggccacaaagagacacctgatggttctgccccaagagcctcctgccagacctaaaatagccaccccaaacctggaaccctaagagttgacaatgctccttcaagatttagaatcctgggaaggcaggcctaaaagggagtattcttttctccccattttacagtggggcagggagagtccggtgctgggttctgcacagagcagagtgaaaatcccagccctcccaagtccccatccccaaggggctcaggggaacccactaaagcacaggccactgcccctgatggccctagctttttctgccttctactcaagagttaagacttaacatcctgctaaggggtattaacttttaagttgccataaaaccaaataattatatttatctatttgttttaactctgggcatggctaagcatacatacggtatatgtacacctaaaaagccagcaagcacgcctgctgcaaggggcactttgcaaaatgaggcatgaggaaaagagtcaaatctatgtccctcttctcaagttccatttgcagggagaagaagagaaaggaggaaaaagaaaagcaagactttccgcacagaagcaggccttcacagttacggccttttacaagatgatcctgagctatgtttcctgtctctgagggaggcaccagcatataaaatggtagtgaatttgcattacttccaatccatcattctctgggtatgcaggaaaaaccaggggacccgctgcaacaaagctcagccttcgtgttgacagattcttatttaagtgactatgaatacaacaattccacaaataatttgtcaagtgtgtggctgaactggctctgaaccctgataaataccgactctccttccgctacaaaagcagcgtgtttcgtgtgcggacaccgtggagcgggcacaaggatttaacaatcaatgctactatatttctctcttctttgtggcttagcagaacaaaacacagaaacaactttgaagggtgccttttttttttcctctgtgttaagtacccagggcagcaaggcttggagatctacatcacaagctgcaggctgatggacaagggggtttcttggcagatgacgtggatggccccctgcccgcagaggcctctggcttccgctttgaatagggtcaccctaggcctcaggctttccaggtagctggcttcagcactgcatctggcaccttgtttgtagcctgggccgtaaggatgcagagaccatgcaggacagtgacagtgcacggtggccctgccgtcagacccacgggtctagaagtgcctggaagaatgggtgacacatctccttgaacaaaacgtaaacctaatcatctttgaagactgcaatatacacctaaatgtctcttgcagatgtaatttaggatgcattattaatttatttttcataaagctccccagctcctgagagggtgagtgagagcacagagcctctcggatgataagcctcgtttgtcagggaaaggcgggcacaggcataaaaacaatttccctcctaaaaacccatccaggagaaggcacggactcttttcagggaacgaatcctcttgaaactcgattattccagacgttttaataaagtgccgacctctaatgggacatgaacactcccgtgccatttgcaaagtgaagcagtaacttccccaggctggatggccaggagtcaggaggggtgcctatgcatcaattacgcatcaattacagggaaactttttgactttgggacagtggtgcctatagaaatcattaagaaagaattaactcattctaatacaaaacactaattatttattgtttataaagtaattttaaataacgcaaaggctcatgcagttgggccatcatgattttccagtcattaacttaaccagaatttgcattttgggactctagccagtgacttacatgcagtccttaagttatttttcaaacaccctgtcctatcttaatctattcatcattaatcacatttggtcactttacatagagaacactattcagatgaaagataaaagaaatacattaataaaactaaagcaagttggaatacttcaaaacataaggtaggggatgaatatggttatcaaagcaatttatacagtgtgcacttagtgttaaagtgagactgttaaagtgggggagctgttgcttattatttaaaagagatggtaaggacgagctgggcttttagtgcatcagacaccctctctcactgttcagaaatgagaggatgcatctaagagggtctcaggagtggctttgccttccgcagttgaggcaggtcaaaaaagccgggtggtatccaggcacttctccaacccaagatcctgccaccggtaactacaggttggcctggtgaaggcacagcccctggaacactcagaagccactctccgggcagatccatccatgctccatgctgtgactctggttttcttggggttcacagggagctcacgctggcccccttcagtggcaccagcagcaacttgactggtcctctgggacatagggaatggtcttctgtgggttcctggacattctgggcacagtctccttcttggagcatgaacaaagctcatgggaccccggcagtcaaccctggtacatgcctcatgggccaccgcccagacaccatccctccccaggatggccttcaccatcatccctgcccaggggagtgtgcttgcttcccagaccaagggaggagaagagaaaggagtgggaagggagacatgggaggaaaaccaatgcagggagaggatgaggggaggaaaaagctatatctgctgccacttccttcccgggcagaagacctcacaaatgaacctgcaacattctgagccagccagggccacggccttatctccacactcacaagcagtccatgctcccctgggcagagcccatgccgagggccaccctgggtggagaaagtgtctgggtggtggcccaggggcatgtaccaggctggacctgccggaatcccatgagaactggtcagagaagtgtcatgcccctagggatttctgcttcatcctaggtgagagcagggatcagatcacagtggggccatgggttctttgctggactcagggtcagactgacatcttcagaggaggaaagttgattccctgcacagcctcagagctgggaggggaggggagatgattaccccaaagccagctggtgctaatgcggcagccagccacacttcggtaagtagatgtaaagctcagtttgggagcaagcactagggaaccctgatgaccagcatagttttcatattggatataaaactaagtggggcagacaggagccaaggagagagaactttgagaatgtaattaaaacgttgtaaatatattttgtttgtttgtttgttttttgagacagtcttgctctgtctcccaggctggagtgcagtggagcaatctcggctcactgcaacctccacctcccaggtttgagagattctcctgcctcagcctcccaagtagctgggactacaggtgcccaccaccaaacccagataatttttgtatttttagtagagacggagtttcgccatgtaggccaggctggtctcgaactcgtaacctcaagtgatccgcctgcctcagcctcccaaagtgctgggattacaggcatgagccaccgcacccggactgggaagccatggaagatttcaaagcaggagaaaagtggtccacagtgcatggatggctgcaggttttccataagtgttctacggtgcggcacccgggctacgatcatcaacaaagttactgttgacagaaaggcagccctgcacagacaggagactacgtctgcttgattcacctctgtattttcagcacccccaacagctcctggcgcatagtaggtctagtctgcctgcctattaacaggatgctaaataaaactaaatacagtggaatggttttaatgatgctaagcacagttcactgcttcacactgaaaggcttggatccagatgtctccaacaggcacaagaatcctggaataaacagtttggattgctatctcataccctttgggccagaatcatgattattttcctcataacacatttggaagcccagacatgtgcagtgctctatgagactaagccatggcctaggccttgctgggaggaaggggctgtctatgcatcacagcagaagctgatgaagggacgtcccaccgtggcccataggaccgtaggccatggctcacggaatcgggtggtagacggcactggatgagcatgcagggaatgtgggcgtcaggccttggaacacttaggtcttgcctaagcatcagaatacagggtgtgccaatgctctacagtcacactctttaaggttgtgtcattgctgtgagacgggagggagagaagatggagctggggaggagctagccatgtcgggggcaagacagggacctgggaaaagaagtctaactttgaatagggctgctgacctggcaggggagacaggccctctcaagggtctagcctctgatggccaacatgtactggtcagcacagctcctctaatccctaggggacaatgtgatgcaagtgtccccatgtctggcaccacaagaccggtctgggagtgagtttgtagtcagagcacctggggtgccatctgaataaagaagcgaaagaccatgaaattaaatatttacttccatggcatgccccatcttactggacctgtcactccaccaaaacagaattcaaaagcaataatgccctgcccttgtctcggagaatggtgggctgccgtgtggtgttgagatgccatcactctgcagtttcaccttgtcatttgagctcaggtcaaagaatagaatcattttatgcgtgcctttcaaagtgtctcccccaagtttctttcacgcaacaaaaatgcctgccaaaagaaactggtttctgaagtcccagtcaaaaaagtagtaatgttctatccacacattaatgattccaaaattctccattatgaacaatatttatcaaaaacagcccactatcagatgaaagatgtgcctcatcttttcttgtcaactaaaacattattcactgaaagtttctttcatatctgtttcaggggtttcagtgtcattttaaattgcaaatcaatcatacatctcgaagccctagttctgtaggggagattaacgctctggctaaaattgtttacaaagccatttgtaaaccctctgcagatgcagatgaggcaagtttaccagtttaacattgttgatcccagagaaagccttaagcaatgacttcagagggcaaaaaaatttgttcatttatcattattgtcatgggctttcgcaaatgataacaatttgtcttcatcctatttttagacaatgagccacaatagagtccagaaagccattttgccagatgggagaaggtgctttcattgcaaaatgttgtcttttctttctctgccctataaaattggcttaagtgagaaccaaggatatgttttaatgtcaggattcccagaagacataatgacatacaataaaagcattgccaggctcaggaaggatgtggttcaaatgcattgaatactattttcaatctaaaagagtgacttctggggtagatagaagcttagtaacagtgtggaagatagttatgggttttagcatgctttcatcctttattaatattccccttttttaaatgaaacactgcaataggaagcccaattacttctcattaagatgaataaaaatgttagaataagctggacataaaataaacatttaaagtgatatatggttaattcctccgagctctgaaccactaatcaggaactctctatggaagagaagataagaaaatccagttttcattagaaacgttgcagattctgttgcatttcctcaagctcctggcttgttcacatcagctggtttctggcagcgtccttggaaggagggctgctcttatttctgggtctctggcagcctgggtctctaggagtggccccttccccaaacagcccttcccaccaccctgctgggatcgatgcatcggctccctcagccctcctgggctttgtaagcttgtcatggataatcattttacggttagtctgcctttagcacaaaggaatatttcacctgtgttttccctctatggagaacgataaacagacaagccttacaaagatcctgtaggaaaatgtcgacaccagggacatcctatgtggtcctttttggtttggatacagggccagaggaacgtaagacttcatttctagaaggctttattgtagatctgttattttagcaagcaatactattgattgaaaatactactgttactcactggatatactttggagaaacatgagagctttaccgagcattaatccatctaaaagcgaatttccaaatagtctgcatgcacacacacgcgcacacacacacacacacacacacacacacacacacacacgcatctctgaggtgcccaagagcagaggctctcgtttggggagcaaagggaagctgatccctcagatgggtcgttggcatgtacagtagggcagtgactgtgtggagctgatggcctgccgagactggttgccttctttaatttagcaaactgggtaatggccccgtttccatgctcttcgtgctgtccgaattgcagatccagctggcagaagcagctcctccacctgccatttccttaaaagcaaacaaggagacaacttttcagtgtcatctctatcttcatcttccttgtggctctttacttctgatcttaattgcagtcccattcgcaatgccctcagccagcttgccccatctgcatcaaacacacctcgctcgttcctttctctgcccttcctctgaaagctgaatctgccttccagacaccactctgttcccagttttatggaggtctccctagtgaccccagtctcagggaccctcctcgtccacgttctctactgcccggcttgttagctcaatcagaatagggacagttttatttcgtaatcaggactggtttttattgttgtcatttgtgtgatgtttttgttattgctgatagaacagtatttatgcatttgggattgtattaatgattttaagaaaggctaggacaagacatggttctataagtaaaatgcttttaaaagttttattttgtgtgataatttaaatcatagaagcattcatttatttgcctatcttttttcttttttttgaaacagggtctcactctgttgctccgttgcccaggccggagtacaatggtgtgatcatagctcactgcagcctcaaattcctgggttcacgcaatccccctgcctcagcctccttagtagctgggaatacaagcatatgccaccatgcatggttaattaaaaaataataataattgtagagtcaggggtcttgctctgttacccaggctgttttgaactcctggcctcaagcattccttttgcctgggcatccaaaagttctgggatgacaggcatgtggcaccatgcctggcctatttgcctgtcctcttattgcaaagccaagtcttcttctaggcttatgggtctgctgattggtgtttcaggcactctttcttatataaaccacaaccataatacataacctacaaaattattacagtatcttcaaaggggataaaaaagatcctcacaaggcaaaataagtgtgaaattcctccagatttttggggccagtctctatctcttacatttgcttctcacacctaattttctaccagtctgcattgaatctttacaaagcaccacatctagttctcatagacaccactacgtcctttacactcttatcacatctgagcagcatatatatataatatatatatattatatatataatatatatattatatatatatattatatatataatatatatatattatatatatattatatatatattatatatatattatatatatatatatttgttgttgttgttgttgttcttttttgagacagagtctcacactgtcagcagggctggagtgcaatggcgtgatctcggctcactgcaacctccgcctcctgggttcaagcgattctcctgcctcagcttcccaagtagctgggattacaggcgcctgccaccaagtccagctaaatttttgtatttttagtagagacagggtttcactatgttggccaggctggtctcaaactcctgacctcgtgatccacccacctcagcctcccaaagtgctgggattacaggcgtgagccactgtgcccggccaatattttcttatatgacatacttacaataacaagtacagttgacagattctgattcttggtaaacatacaacgtgtgactggtgggaacagaagtgtgcagacattctagagtttggaatacttatgggagccctaaatatcagttgcgattttacagaaggaacagagtgtatctgttatgttggttaagttgagctagtctgttgagttggttatgcatggaccaagccaagaatcttggttgtgttacacttagacctgggttcaaatcctggctctgagacattggaaaagttagcttctagatctaagcttcaattttggctgggtgcagtgactcacacctataatcccagcaccttgggaagctgaggtgggaagatcacttgaggccaggagttcgaaaccagcctggtcaacatagcaacaccccatctctacaaaagaaaaatcaaacttaaaacattagccaggaatggtggcctgcagtcccagctacttgcaaggctaaggtgggaggatttcttgagcccaggaagttgaggcagcagcaagcagtcatctcaccactgcactccagcttgggcgacccaagagtgagaccctgtttcaaaaaataatcatcatcataataataagcttcaatttcctcatctgtaaagtgagggcagaaatggctccatagcatagcaaagttgtcaagagattaagttagatggtgcctgtaaagtgtttaatacaagatctggcacatgggaggtgttcaaaataagtaagcgctgcgagtactgctgctggtggttccattttattctcaatgtggtaaaatacacataacgtaaagtttaccatcttaaccatttttcagcttgcagctcagtagtggtaagtgaattcatgttgtgcagccaacctccagaacgctcttcatcttgcaaaactgaaactcaatactgattaaacaacacctctgcattctctcctggtccccagcccctagcaacccaatcacgcccatttttgaccctgtaactattgtttctgccatcctgcatttcttgttactctgtgagtccctcccattcaagccaccagaggctcattgcctcaaagaagaggtgggctaacagaaaagagaaaaataactctcttaggagctttcacgtctcaagcccaagcctggaggagtagagaacaatatgattgatcagtgcaaggtttcctcctccagagactaaacgaatgcagtggagggaagaagaggaaaaggaaataaaaagcttaggtgctggtgggtccccaagaagggcctggtactcagctatccctgggattgagcccgagcaagaagataagaatatttgcaggctacccaagcaggaatgaggcactacccagcaaagacacaacactggacagagtgatgacctactatggggaccacaccaccctagtcctaaagacaccttgtcattatgtaagattccaggaaaatctagaaagcccacaacgtggctaacattgttttcatcagaatgaaaaactgaggacctgaattaaaaatttagctgaatcaggccagatgcagtggcttgtgcctgtaataccagtgctctgggaggtggtggtgggaggatcacttgaggctaggagttcgagaccagcctgggcaacatagcaagaccctgtctctaaaaacaaacaaataaacaaacaaacaagcaaacaaacaaaacaaaacaaagcaaacattatccaggtacagtggcatgcacctgtagttccagctactcaggaggctgaggaaggaggatcatttgtgcccaggaggtggaggttacagtgagctatcattatgccactgcactccagcctgggcgacagaacaagaccctgtttctaaaaaaaaaaaatttttaatttacctgaataataagaaaagcactcagagatattttttctgcactcctgatcttgagcactggggctaaaagctgctctattccatactctgccccctttactcgggtcctgggatgctagtgactacacttcacactgtctcagtctactgccttgctcatacttcaggcccaaggggaacaacatattcccacagcttatgtctgattggacaacagaggtcatgtccttacccatgagccacatcctgtggccagtgggatgagatcattctgatatgcctcagctagagccacatgccccatgatcagagctggtaaagcatcaaaatcccttgaagcacatgagctatatgagaaaagagtaggaaccaaaaatataattatttatctattaccaagagaaggaggattgaatgaatgcatttgctgtatttccacttggtgactgagtgtcctggtgggtctgtgcctgtgaagctgtgtgcatgcatattcatgcttgtgtgtgcagtggggtatgggtgggagtaggtaggtaggcaaaagtcacccaggtattgtcagaaagtgagttcaggctgggggctgtgactcttgcctttaatcctgacaccttggttgctgggtgtccaggggtctggacagtcaaccaccaagtggaaatatagcaaattaatttgcttgttaatattaataataatatcaataaatattaggcaaggttttattgaacatccattgggtgccaggcagtgaatcaagctaacacaaatccctttcctcaggactcttacatgcaggaagaagatatgggttcaaagggagaagacggatctggctggaggaaaatgagctgtggctagaggaaagaaggatcgggagagagagaagagggttccagagggaagaaagagggctctggagggaggaaaataggctctggagggaggaagagggctctggagggagggaaagtgggctccggagagatggaagtgggctctggagggaggaagagggctctgaagggagggaaagtgggctccggagggagggaagtgggctctggagagagggaaatgggcgctggagggagggaaatgggctctggagagaaggaagtgggatctggagggagggaaaagggctctggagggagggaaatgggctctgaaggcagggaagtgggctctggagagggcgaagtgggagctggagggaggtaaatgggaactggagggagggaagtgggctctggagggagggaactgagcactggagggagggaagtgggctctggagggagggaaatggacgctggagggagagaagtgggctctggagggagggaaatgggtgctggagggagggaagtgggctctggagggagggaaatgggtgctggagggagggaagtgggctctggagggagggaagtgggctctggaaggagggaagatggctctgaagagagagaaatgggatctagtgggagggaaatgggctctggcaggagggaggaggtctctggggggaggggagaatgctctggaggaaggaaatggactttggtgggagggaaatgggccctggaaggagggaaatgcttcactcaaatgtttgttcccttggcctccttcttcttcagcaggaattacacgtgttcctggcaccggcctgccaaagcacaggctcattgtctcctcctaaacaccaggacaagcttccagaaccaagcctcgccaccataagaggcaactgagaccgtttcctagaatgaaagtgatccgtatgttaaaaatgcaataagcaagtcagcagttttattgatttttttcttcatacctccttaaccaattagtttgaaacagtgtaaaatggtctatgtgacagattgctcaacagatctcacttttttcgggagtaagacagagtctcactctgttgcccaggctggagtgcaatggcataatcatagctcactgcagcctcaaactcctgggctcaagtgatcctcccacctcagcctcttgagtagctgggactacagtcgtgaaccaccatacctggataattttttatatttttgtagagatgggggtctcacaatgttgcccaggctgaccttgaactcctggcctcaaccaatcctcctgtcaaggtgctgggattataggcgagagccactgcacccagcctgaactgactttcagacaatacctgggtgacttttgcctacctacccactcccacacgtaccccactgcacacacaagtgtgaatacacatgcacacaagtgtacacacacagattggctgggaccacccaggattcaatcctccttttggcaatagattctgaattatacttgtagtacttattctttccctatgtagctcatgtatgtcaatggattttgatgcttttccatctctgatcatggggcatgtggctctaacctaagcatatcagaatgatctcatccctctggccacaagaacgtggttcgtgggtaaggacctgacttcagttgtccaatcaggcataagctgtgggaatatgctcttctctgctaggcatgaatgaggaaccatgaggcctgagcatgaggccaggagcagtgttaagaccacaagaggctgagagtagggctgctgagagtagagtggttttcagataagttctctgattctttaacatgctcccttcagaaggtggagcttaatgcctccgccttgaatgagctggatttgatagcctgcttctaatggataagatgtggtaaaagtcatgctatgcaacttcccagacttggtcataaaaccaagagcatccacctggctctctcttactcttggatcctttgttctggagaagccagctgccatgttgtgaggaggcccataggggaagaactgagctcccctcccagaaaccctcagcaccaatctgcctgccatgtgaatgagttatcttagaagcacatctccccagttcatccagaggattgtagaatcaactgacacatcttcactgcaccctcttgggagatttagagccaggaacaccaagctaagcttctcctgcattcctaacccataataactgtgagatgccaaaagtgttttgttgtaagtaactgagtttttaggtaatttgtgacatagcagtagataatgaacacagaaacccataccaagacaaacaatcattaagttgctggatcaaccctcacctgaagttcgcttgatcctttagacttttcagttaagcaggtcaaaaaaagtttctttcttgtttaagccaatttgagttgggttttctgttatttttccttgaaggcatattggtagatatatttccaatcctttcctctggtctcagccttctaaagggagctaaaaatacagattagcttattttatttaatttcaaatccttgtttcagttgctcctgcttgtaactgtggcatttgcacgaatggaagcagatgctgttgcaatctccatgcagataattccttctctgggttaaggatgtaataaatggaaaggggaagataatttacacctgaatatataaagagtctacaggtaataacccttaaatgtatcctgtctgtatatagtggttgttattttcctgcccaaagctgccaaagagaaggagagagaaaagatgttaattcttacttgacagtgggccttgtagcattcttcaaaccaaaatgaaaaacacagagaactatgtgatggttacaggacttacacgcctgaaaacccagtgttccctttctctgtcctttggaagtagtttgttttgtttgcttgtttgtttccttgcttgtttgttttgcaatgcaccgaagagacagtaggacttccctttaagaaaaaaaaatttaaaaatgatttgtgcatttgtatgtaacaatggggaaatatcacagcaagatagcatatgactcatgttattgacaatgttcagaaggatctggaagaaagaaatgaggcttatggtagggtctggaatgcaataaatctaagttaaaaggaggtgctggataaaatacatctccaagagcctttggctgtcttccttctctgaacaaaactaagattggccaataacaattacagtacctcatgtatcaactgtggatattgtcctactgcatagacatggccatgtgaaatctatagatcgagggtctacttacacctgataagacttgtcagtaaattatatctttattattgcttctaggttcccttcctggatttttaaaacttgactgcctggattactggctctttatttaggaagaactttgaaatttacttatatgaatttcatcagagatatccttaagactcattgcatgtttcaaactaacttattttgggggatggattagggttgatgtttggatttggagtcctaagaactcaatatagatctcactttccccttaatgctaatataaccctgagaaagttattgaatctctccaaacaatagcctttcatctgtaatattaattattttgtttgtaataataaaagtagcgcacactcttatataacttactatgtttcagaccctgttcttactattttccatttcttaactcatttaatcacatcacctaatgtaattctttcatcccaaagctcagcacatattagatactgcaatgacagtatcccctttcatttagaaatgaaatattaaaaggcataattaatagacggagcacaaaattatctattgtaacatttctcacacatcttggtgatgctagtctaaaaaatatttttacacttatactctgtgaccatttttttcactctctcccacacacacaggcacgcacacacacacacacacacacacgcatgcatggtgaaagagcacgatttgtgaaaatcaatgtatcattgccttttctataatgtccatctctatccaatccacctggtgtcactggggacatcagagagaccctgtgcttcaaagacaaatgccatcttaattggacaggtctctttttaacatttaacatttcctgttggacctagcttacactagtcaatttttttttttaataaacaagggaaggaaaaaaaaaacatgatctaaaacccacatctctaagttatcagtgtttggtgcaaatgcgttgattctagcattcacgcgggtgcaatgccatacatgggtatcagccatattagacacagggctcagggctgtgtgcaacctgcatcagtgactgaatatgagtgacaacccatgcagcactgttaaactaccacctcacatcattacccacaataatagggactcaaattggtggagatgacccaagttctgcctactgagacccaagttctctgtggaaacactgaaagatgtcttgctcttgatggccagtttgatgcaaaatccctgaggaagtggaatgcaacgtgctaccttctcttcaaattaaacccaggctccaaagccacgtggtgaacccgctacgaggacagcatgactcaggaagaaccctgcttatggacttcgatagcagagaggcctggattcaaatatcagctgtcacctgctcttttctgaaccaatgtttttttgttaggattagatgagatgatactgatgtactctgtaaacatagaaggctttcagtaaatggcagaagaagcaagaaaagtaacaataatatttgcctctcctttcctacctcttcccttgagctccaaatttatgcagaactcaacctaataagtcagactcaccatctagaccttaaacttgcaaaaaccagaaagctgggtcatcaccacatcctctcctctccattctcaccaattgtgtagctaaatcaagaccttcactggactacagctttggactttgcttcagaagtcagaattttcttccttcttctaaatagatactgaagcaagatgaagaacacaaaaaaatgtgcttaaaaatatttagggaaattaaaagataaatgcaatgcaagactccaagatacatgtgaggctgtcaaaagcagctgagattgaggggaagccacacaagaggacgtgaaaagagatgcagcatgtggcctcaggatcaaatggtgccatctttcaggaaggacaagcagaaagatattttttaaagaaggactcaggtgagagtcctgaagtgcaaggttattcctgttttcaacaatgggaccaggtaatagagcaaactgcgcttacgctcagaacatggttggcctggcttgggacaaaatagcagagtcagccatagttgcaggaagcagtctgtctctgaggcaacagaaaacagaaaatatttttatttatttaaaaaatgtagctatataagttgtacaatatgatgttttgatatgcatacatatagtgaaattattactacagtccccaacttatgatggtttgacttactacagcttttgtcatggtgcaatagtgattggcaaccacaggttttcagatttaagcaccactggttctttgaccaaagatactctgcgctgtattttcacgtgatgggtttatgagaatgtaatcccgttgtatgtggaggatcacatgtgtacagtcaactaaatatcccatccattgtctcacgtagttacctctttgtgcatgtgtatcatgagagcaactgaaatagactctcttagcaaattttccagtttacaattcagtattcttaactatagtcctcatgctgtacattagatctctagacttaggcttcttccataaccacagctctgtaccctctgatgaacatctccccatttcctcccacctgcttgcccatggaaaccacccttctgctctctgtttctacatattcagccttttttttttttgtctttttgagacggagtctcgctctgccgcccaggctggagtgcagtggcttggtatcggctcactgcaagctctgcctcccgggttcacgctattctcttgcctcagcctcccgagtagctgggactagaggcgcccaccactgcgcccagctaattttttgtatttttagtggagacagggtttcaccgtgttagccaggatggtcttgatctcctgacctcgtgatccacctgccttggcctcccaaagtgacatattccacatataaatgaaatcatgcaacattgctctttctatgtctggcttatttcacttagcataatgtcctccagtttattcatattgctacaaatggcaggatttccattttaaggctaaataatattccactctgtgtgtgtgtgtgtgtgtcactttttttaaatccattcctctgtccatggataacttaggttgattccttatattggctattgtgaataatgctgcaatgaacatgggaggccaggtatctctgaggcagtgattttattttctttggatgtgtacccagaagtgagatacctggatcatatgatgctcctatttttgagaagccttcatactgttttgtataatgactgcaaccatctacattcccatcagcctcataatggggtacaagggttcccttttcttcacacccttgctggcattgttacctctcatcgttttgacaacagttgttctaacaggtgtgaggtgatatctcattgcagttttgatttgcaactcagaagggaaaatctgacacgtgagatctgaaaggctccccatcgcccatcccttggtcctccaaggccatgccttacctccacctggaatttctgctagtgcctagcagggaaaattaaacacatccaactatgagtcataaaaggagtggacatgattcctataaagaaatctcgaaaggaaaaattggaaaagagtcacaaaacttaacaaaatgaaaaacgctcaccagaaattatatttccatagggtaggtaagaactatgaccgaatatgtggtaatgacttaaaaaatggaaaatgattacatctatagaggaagatttttaaaaagaaacaattatctcatgtacattagcttggtgttaaaggatgtcattcaaaaatgaaaaatctagtgataaatcacacatatacatataagcaatgaggtattgcattagtctgttcttgcattgctttaaagaaatacctaagactgggtactttataaggaaaagtgatttaattggttcacagctccacaggctgtataggaagtatggcagcttctgcttctggggaaggtgcagggtgcttccaatcatggtggaaggcaaaaagggagagagatgtctcacatggccagagcaggaggaagagggtgggggtgccgcacagttttaaaaaaaacagatctcgtgataactctatacacaaacagcactagaaggatgatgctaaaccattcaggagaaccacccctcaccctccatgatccaatcaccttccaccaggccccacctccagcactggggattataattcaacatgagatttgggtggggacccagatccaaaccatatcagatatatactagcaaactattacaaactaaaattgggtgatagaagggaaaggaagagaaagaaaggaaaaacaaatatgttaattgtatcattaattatggcagggaatgaagaagagattgtctaaagaaataagaactaaaagtctcatataaagttataattgcagatgttataactagtaagaaatacaaacctttttaaatatcaggagaatcaaagcacataaaataaatgacatagtagaggactttaaaaaacaaaaaatgtaatatacaatgatatctcagaacctagaccaaatatacatcatggaaaatgtcaatgggctcaactgatctatcagaaacattttcagttgtttgtcccacaaagcaaagctggcctcagctgtagtccaaagacacattagaccatttgttcagcaaagttgaatataaagggacgtttaacggatacccaaatagatgtaaacaaaaggaagcagaggccatactcttcatatctgagaaggtagacttcaggataaaagcatgaaatgagacatacaagtgcacttcataattctaaaggggagagattcacagtgacgatacaaacattctgaatacccacgcatccgaagcaacaagaatgcagcaggaattacaggagactcgggagaaaccggcagtcatgctcgtagcaggaggccactcgccactctcgcccatgagaggccaagtggacccagaattagagtctagcagtcctcgataacataagtactaagacagactgtgctgagtcatacagaccacataccttgacaatagatcacttattttcattttcaaatgcccatgaaaacatttatagaagaacagatcacattctaggctacaaagaaactccaatacatattttaaaaatcagaaaggtgtagatattattctctgatcataatataataaaaacagaagtaaataagatcagaaaataaacaaaatcttttccacctgaaaatttaaaaaaaaaaattgctcttaggttaaaaaaaaagctcctagattaaggaaaaaacacaacccgaaatttaagaatgtctttaaaataatagtgaaaatactatatttcagaaactatgaatacagctataaaacactctgaaaaaagtaataaactcaaaaatgtatatcaatttttaaaagagagaatgaaaacaaatgaattaggcatatgacttaacaagttagaaataaaacaaaatgataagggaaaaatcaataaagataaaagcggaaattaataagataggaaactagaaatccagaaaactaaagaataaattcccaagctgtttctttagagtaaggagaagaacaataagataagaaacccaaaacaggtataagctttggcaaattttattaacttttaaaaaaaatcagctgatctgataatgcttaaactattctagggcatttttttttaaaaaggaaattatcaaagtcttttattgaaacaaatacaacaatacacccaaacctgaaagagattggaccctaaaaaattaaaaaacaaaaaaagtctaatcttattatgtacattggtgcaaaaatcatctgtgaaatttaaacaaaccacattcattagatcatcaaaaaacaataagctataaaaatggggttttatttcagaaatttaacaatggcaaaataatacaaaaatccactaaataagtcaatctgctactagatttaaggagaaaaacatatgattatctcaaacacgaacaaaaagtacttgttaaaatttaacaattcttgattatataaaggaacagcaaaagttcaataaaataagactaataaataaagatttcctagaaatgtatacaaaaggaaatggccaagttgaaagtgggggccaggaaaattcacagaaaagaaaaagtatatgattcaaacataagaaaaaaaagaaacttcgcttcactctaatgagagatcccccaaattaaagctatcttgagctgccatttttcacctattgaattggcaaaaatccaaaagtttgataacactctgctagtgagattatgggaaaacagataccatctattgctgttgggaatatgaattggtgtaacccctgtggagggcaaatcagcaccatctatcaaaattacatatgtatataccctttgacccatcaattatacatttgggaatttatcctccagttccacttgcacacgtgtgaaatgatgtctgtgcaaggttattcattagtgttgcttgtaagagcaaaaatgccaaacaacctaaatgtccatctagaggaaactggttaaataaattatggtacatccatacactataataccacgaagctattaaaaacatgaggacactttccatatatggatatggaaagattgccacaacataccatgaagttaaaacaaataaacaaaagcaatgcgtcaaacagcatgtacgttgagatgccttttgtgtaaaaggaaaaaaaatatgtatttgtgttaggttgcaagcaattttgttgtcttaagaaataatccttcaaatgttgactccaacccatttttttctggttgatcacccactgttggttcctccaacttgcaccccgctctgaccatacaacctatgttctagttacatggagccatttgacagtctctggatatctttgtgtatattgtttcttctgcctaaagcaccaaggggcctgtgtctgccccatgatccagttccaatagcacctctgcactgggcacagagtgagtggctcccttctccatagtcacgtgcacattcttcgtttttggattgtactgagattctttgctcagatatgtaactccccacaaaagaccttcagaaacccaggaccatggttcatgtattttactttcctatgtgtccccatgacttttccagcccagatcacacatgcgatcaatatgctttaaatgatgaggggttgtaaacagcctaatgtccattggtgaatgaatggatcaacaaaatatggtatagacataatggaatattattcagccacagaatggaaagaaatgctggcacatgctataatatggatgaagcttgaagacattctataaactggaataagccagacacaataggacaaatgttgcaggatcccacttctatgaggcacctacagcagtcgaattcatagagacacagtggaatggtggttgccaggggctggaggaggggaaacagggagttactgtttaatgggtacagagtttcattttgaggagatgaaaaggttttggagatggatggtgatggatggatggtgatgatgattgcctaacaatgctactgaacagtgcacttaaaaatgattaaaatggtacattttatgtgatgtatatttcatcacaataaaaagtatgacttaaatggggtacccaaagaatccttaagatcgaaagtctttacccttggttaggtgccatggctcatgcctataatccctgcactttgggcggctgaggcaggaggaggattgcttgagcccaggagtttgagaccagcctgcataacgtagcgagaccttgtctctataaaaaatacaaaaatcagcctggcatggtggcatgtgcctgttgtgccaggcactaagagactgatgtgtgaggattgcttgagcctggggaagtcgaggctgcagcagtgagctgtgatctgcaccactgcactccagcctgagtgacagaggtcctgttttttttttgtttttttttttttttttaaaaagacccacatcctctcatcttctgccaaagaaggaaaaagaaaagtctttatcctgcagaacatttttgtatcctgttcctgaacatggtaaatattgtgcattgcttccctgttcatctgtcaaaatcaattctacccttagaaagctctcctgggacttcatcgaaagctataaataagcggtcactgaggccttagtaaataggctgcaccattcatttgtcaataaatattgatgaccccctaggtggcagacaccaggtgctggggatacagaagtgaaaaagatgggcatctctcctcacctcaaggggcttacccacaatgctgaatccacagacctcttaagtcactttcaagaccctttgcctccaggtccttctgtcaaggaggtcacccactccatggccccctcctctcctctaccctctgtagcagtgttcgcataggatgctgtgcgtccgctaatgttccacagcagagaaccaattcccttaagtaaataaaacacaaaaagtttatgaaatacatcgtctgggtagaaaagcaatgctcatttatatgttttatttgtgagtgggttattgctggggtagagaagtgctattgatttttgtatgttgatcttgaatccagcaatcttgctaaactccattattagttctaaatgtgtgtgtgtgtgtgtgtttatttctttggttattctgggtagatgataatatcattagcaaatatgcccgttttatctcttccctcccaatcctgattttttttttccttcatcatgttggccatgaccttttcaataaaatttcaaaaacaaacaatgataaggcatccaaaaggatcaattttattatattgaaataaaaaaaacctgttcaaagaaaccaggaacaatgttactaaatgctagaacaagagaagagatttgccaaacctaaaacaacaggggattactgtttctagatcatgtaaggaatttctgcatatcaacaaggagaaaatgttaacctaatggaaaaatggtcagaggatatgaataagtaattcatagaagagaaaactttaacaagcacattggtgagatgcttacaatcattaatcagagaaatgcaaattaaaacaataataaatattactttatacatattagactggctgactggtaagccgaagaatgcaacatgttgaagggagtgtgggcatatacaattgtaattcactgattcagggaatgcgattggtacagcaattctggagaaaattgggcagcctagtcacatgtttttttcttggcttggctttttatttactttttcaattttattttactttaagttctgggaatacatgtgcagaacatgccggtttgttacataggtatatatgtgccatggtggtttgctgcacctatcaatccatcatctaggttctaagaccagcatgcattacgtatttctcctaatgcactctctgtctttgcccccaaccccctgacaggcccaagtgtgtgatgttcccctccctgtgtccatgtgttctcattgtccagctcccacttatgaatgagaacatgcagtgtttggttttctgttcctgtgttagtttgctgagaatgatggcttccagcttcatccatgtccctgcaaaggacatgaacgcattcttttttatggccgcatagtattccctggtgtatatgtgccacattttctttatccagtctatcatggatgggcatttgggttggttccaagtctttgctattgtaaatagtgctgcaaaaatttagacctaaaaccataaaaaccctagaagaaaacctaggcattaccattcaggacataggcgtgggcaaggacttcatgtccaaaacaccaaaagcaatggcaacaaaagccaaaattgacaaatgggatctaattaaactaaagagcttctgcacagcaaaagaaactaccatcagagtgaacaggcaacctacaacatgggagaaaattttcgcaacctactcatctgacaaagggctaatatccagaatctacaatgaactcaaacaaatttacaagaaaaaaacaaacaaccccatcaaaaagtgggcgaaggacatgaacagacacttctcaaaagaagacatttatgcagccaaaaaacacatgaagaaatgctcatcatcactggccatcagagaaatgcaaatcaaaaccactatgagatatcatctcacaccagttagaatggcaatcattaaaaagtcaggaaacaacaggtgctggagaggatgtggagaaataggaacacttttacactgttggtgggactgtaaactagttcaaccattgtggaagtcagtgtggcgattcctcagggatctagaactagaaataccatttgacccagccatcccattactgggtatatacccaaaggactataaatcatgctgctataaagacacatgcacacgtatgtttattgcggcactattcacaatagcaaagacttggaaccaacccaaatgtccaacaatgatagactggattaagaaaatgtggcacatatacaccatggaatactatgcagccataaaaaatgatgagttcatgtcctttgtagggacatggatgaaattggaaaccatcattctcagtaaactatcgcaagaacaaaaaaccaaacaccgcatattctcactcataggtgggaattgaacaatgagatcacttggacacaggaaggggaatatcacactctggggactgtggtggggtcaggggaggggggagggatagcattgggagatatacctaatgctagatgacacgttagtgggtgcagcacaccagcatggcacatgtatacatatgtaactaacctgcacaatgtgcacatgtaccctaaaacttagagtataataaaaaaaaaaattaaaaaaaaaaaaaaaattcgtgtgcatgtgtctttatagtagaatgattatatagtagaatgatttataatcctttgggtatataaccagtaatgggattgctgggtcaaatggtatttctggttctagatccttgaggaattccacaatggttgaactaatttacactcccaccaacagtgtaaaagtgttcctatttctccacagccttgccagcatctgttgtttcctgactttgtaataatctccaatgtgactggcgtgagatggcacgtgctcctgtgcttctatcccccacgtttccacacatggcccttagtggacacatagtgagaagttgatggtagcatggtttgacgtgccaaatagttggaggcagttgggttgtccattattggtgtgtggacagacaaaataccgtggttgcaagccatgggtcagatgcagcaattgaaaaaaaaaaattctagacgtacagataccaaactggatgggtcttgaaaacatagtgccgagtgagagaaagtcaacaaaaggttataatgtctcaaccaatactgtttacataaaatcaagtttcacgcatacaaatcaattgtacacattttgcaagaacacatgtagacacaaaaagcaagtataagtcaaacatatcaaaacggttgcctattgggaaaggaaaaggggataaagtgaatgaataaatacaacaaaagcggaccctcgtacagagtgatggtggcaatgccccatgacaaaagagtgagattcttttcgtaaaaaaagaagaaaaactaaaaagacctctgctgagagaacaagggcttccagagagaaagaatagtagtaatcagtgtctcccatgcaagcactaaccaggcctgaccctacttagcttctgagatcaggtgtgttcagggtagacacaacccgctgtctcaagagttgcatggggcttctagctcagccaaagcaccatcacaagatgttcgacactgcaagaagcccacgaggagcggcaccaaccacacaatatggggctacagtgaactccaagggaaggcaagactgggaagaaagacaagcctttttacctgcttcccacctggggcagaaaatgaggtggtggcacccaagagggaagagggataggaggaggatggggagtatctcgttaatctcaccacccactgccttccttgtgctatttcgtgcacaaggaggggcgtcttgtctacatatctggccaggctccaagccctctgttgccagtgagatacgtaagtgtgcaggaggagcagacctggggagcggagagaccaaccctgtattcatcctatggagggagtacctccttctctaagctctgatttatagaagataaataattggcctcagcaggcagtcaggcaggaacacacctcgctttccctgggttgcttctcttgaatatatcatttgatgttgcagcagaattggggttgcacccccatgttaaccgatgccctccagaaagccaggggcagcgagaggccagccatggtggaagcggccttttatgagtgtgtgtcaagaaagcctgtggtgtagcgagctagactgttagagattacatattgacctggctccctgaatttattctctgctggttgtggattgttcacaccagtcccttggaaagtctgccaccctgcagctctcacgatgctgttagggacggggagtccacggggtttacctgtgtctctgggctatctggaatacaggaactggaaggaaaaacacatttggtaaaaatgtagtgcctgcagagggtgggtttgagtggatcctatggattgagctgggagccaggggctggtcatcaattcagaataagacctgtctgaacacagtggaactctagagtgatctgcagtataatttagggcagttctgctcatgactcccaggcctgggggttggaagtgggcctgagaggagcaagcttggtgcccatagctaagtgattagacattatccttgagcactgactcctgcttaggaggtcagcactgctctcccacctgtgtgacggccgggaaggaggcggcacggtgggtctgtaaggtggaggcccacggcttctgccggcatcgcgggggctctgacaccagaatggcatgattcaggaaacaagtttaggagccaatcaccagtttggatgggggctgaaatccctggcttcttcaaatatacaccttcgtaaaaatttaggagattcatgcaaaaacttggaaagcaacccaaatgcaaacccactcacaagcattgagtggaaggaacatctattttaaatgtaataggcccacaattctcacccttgagtagcatcttccaggctttcaaagagcacaaggggaattttgcatggttttcttgggctgcagggcgaggagagatggtctacttctttttgattcccacgggcctccagaaggacttcttggtggtcccagaaatgtcatcgggcgaccaccacagttccacagggagggaggtgaacgaccagggctccttattccatagatgaatgaacgaaaaactggtcttgcaaacctgtgctagcgtgcatttgtgataactgcctgcagctgagacacaagcctgtatctttgctttgtggtattcttttatttatttatttattttgagacagggtctcgctccattgcccgggctggagtgcgatggtgagatcatagctcactgcagccttgacctccagagctcaagagatcctcccacttcagcttcccaaatagctggaatcacagggcaccactgtgcctggctatttttttattttactttttgtagaggcagggtctccctttgttgcccaggctggtcttgaattcctgggctcaaattatcctcccacctcagcctctcaaagtgcagcaattacaggtgtgagtcaccacacctggccttggagcattctcaatcatctaaagttatccctctggacaggagggtattggctgccagtctgacacccttctcctccccctggccatcccccagtctgtgtattgtgtacaactttgagacctctagtatcaagcatactccatgcagcaatgcaataattagcaggacatggcctgagcgacctgaaagaaataatgacatctccaacatgccaaccttgcacccaaggctcggctttcactcccaaagaattaaagtcaacatgtgtttgggcatcaaatcagagaaaactgtcaactctttcgatttgtcagttctgcagtactgaaatttctttctaaaaacagtatccagtttcaagtatgaaagaagggaacgtataatacagatgtttcatgaagtttgaagtagcaagagtccaaaaccatcacttttacattatcagccacctctgaagagttcaaagcatttttgtgaacattttagggcaaaatttcttgacaatagactgtgcagaaattatccttatttttgcaaaaataaatgaatgaactttagaactgataaagttctgctgattcctattcttaaaacccagcggacaaagccacgctttcaaagtagtactcataccttcccaggctgtgctggctctttcaggactagccaggcaaaggcatgcttgcaaacatcaggtgagccaagagaagggcagccttgtaaccctgtaagggtagtggcaaccagaatgttcttggtctatttagaggaggcagccacgatggcactagccaatccctgccaggcaggaatatgaacctctcaatatggccagacaatctgatttttaaggagaaaatggaaatctaataatttggcagtaaaatctgattattgaatgttggcttcttcttattatgatttttaaaatttactgtgagccaagcaaatcacatctgtgagccagacattgcccaaggaagctggcttacaaccacagtcctgagatgtcactactgatagcaatttctatctatgtttaaggaaggaagaagaagaaaaaagagactccgatttgaaaccataaatgaccacagccacatctgcctacttggaaggtgcatcgtttctctccagtctggaataatttctaagaagtatactatgacaggtctgggctggaagctctccctgtcaccatccccacacatccccagaggtctgtgccctgctacaaatgaagcccatccctctctccccgcaccttcctgaaagtttccacatgtgactgccattttccaggagagcctgggggtctagggaagggctgctgctccacgcctgtgttcatgcagttagtagaggagccaaagccacaaggagcaaaactcctgatgtgtcaataattctatataacgaggaagtgggagaaaaagaagtcacgcagactgcccagagatcttaggtagggggtttctgggctttttacaggaagtgggtctggattctagattgatctatgtatgtatgtatctatctatctatcatctatctagccatccatctatctatctatccatctatctatctatccatcatctatctatccattatctatctatctatgtattatctatcatctatctatcatctatccatccattcatctatcatctatctgtcatctatctatccatctattatctatctatctatctatctatctatctatctatctatctatctatctatctatctatctttattatcttaaaggttagcatgatcccagaagctcggaacacttgtggttatgtttagccatgcagccaatattgtccccagagagaagggcacaccccgtaagctgcttcacagtggatcatgagtcctaaaaatataagaggcatggggagtagggtgtgagatttgcagacaaaggttggtattccagaatgttgtgacctctctgcattcagccacccgatggcagggctgggggatcctccaccctggagatgccatgtaggcattacctcgtggccacagagcaaatcctggagcagctgtgagcagggcatttgctccttctctgggctgtggagatacctaagcacacacacaatcttggtggcagcagaggtgctattgagtaaatagaaatggccatggaactcttattacagcattcataggggttaaagaagctaatatgtttgtcaaacaggagggctgagtggacgtgtcctatggcctcccttggaaatggctctttctgcttcagatagtggaaggcttccagacacacagtccccacccattccttctcctggggaagtagccttaacttacacagacagcccgaaagagtctggggacttgtagctcagaacgaaggaaaatgacatcctccagcctggcttaggaacattgctgttcccaaccccgtacaggagacgcctttcttcttatcttcttctgggggattttagagccactcatcatgagtcacagtgaagaggtgagtttttcttacatctgcttagctataattaatgtatgaattgttggcattgtttttctttaaaaaaaaattagaacaactgcaaagggagagtaatgtgcccacccgtggtctgactaatgtcatctcacatatccagatcagtgtatttggttaaagcaatgtgaactgtaaatctgaataatttatcaaactattgaaccacttgtaaaataattgaagcttgagcctagttttgcataacagatttaaactgaagagcaatgtattagcaagatctcaacctctagaaatagaaatggctgtaagagggctgacagtctttatcataaaacacacatatataaagcattcataactggccactgtctttaacaatgacttggtagcatttgcagcccaccccaactggatcctagcacagaggaagggaggctgagatggtggaggaaaagggtcactgacaaaatatttgataatctcagagtttaagggtctggggctgggggagcagagacgttctttcatccatagcataggttagcttgacaattgcatacaaaccaaaggtctggcgaagaccagctggaggtatttagttggcaacggataagattgactccaccaaggcagggcacagtggctcacaatctcagcatgttgagaggctgaggagggtggatcatttgaggccaggaactcgagaacagcttggccaacatggcaaaaccccatctgtactaaaaatacaaaaattagccaggcatggcgatgcgcacctgtaatcccagctactcaggcggctgagacatgagaattccttgaacccgggaggcagaggttgcagtgagccgagattgtgacactgcactccagcctgggtgatagaaggagaccctgtctcaaaaaataaaagtaataaaataaaaaagattggctccacgagtatgagaacgggaggtgtttggttcaccttagtgtgccctgatgagacagcatctgcagtgtcaagtgtacttctgagcccacatgataaaagggacattgataaactaatgaatccagcaattaccattcgggatggagagaaacgtcaaccacattcagtgaggatcggtggagaagcacacttcctccttcattttaaaacttcattatgaaagtattgagatacatatattatagtaacaaaatttgggggaaaaacagataagcaaaagagaaagaaaaggaatcagaaatcataatctctagggagaatccttctgcacattggtctgagcagtgatttttggatataataccaaaagcacagacaacataagcaaaaatagacaagcaggactgcaccacactaaaaagcttgtatgcaacaaaggaaagaatcagtacagtgaaaaggcagcctacagagtgggagaatatatgcgtgaactttgtatctatctagtgaggagttactatctaaaacatatcagaaacacaaatctgtaaaaaaatacaaatcacccaattaaaaaatgggctacattgctgaacagacatttctcaaaagaaagacacacaaatggtcaacaggtgtatgaaaaggcactcggcatcactaatcatcagggaaatgcaaattaaaaccacggtgaaatatcgcctcgtgcctcttaggatggctattatcaaacagagaaaagataacaggtgttggcaaggatgtggggaaaaagggagcccttgtacatccctggtgggaatgaaaattggcacagctgctatgaaaaatagaatggagatttctcaaaaaataaaaaacagaattaccataagatccaataatgccacttctgggtatatgtagaatggaaaagatatcagtaactggaagagatatcttcactcttatgtttattatggcattattcacaatagccaagatatggaaacaacctaaaagtctgtcaacagatgaatggataaaggaaatgtgacacacacacacacacacacacacacacacacacacatataatggaatattattcagccttaaaaatggaaaacctgagccgagtgcagtggctcctgcctctaatcccagcactttggagggctgaaccaagtggatcacctgaggttaggagttcaaaaccagcctggccatatggtgaaaccccatcgctactaaaaatacaaaaatgagccgcccgtggtggcacacgcctgtagtcctagctactcgggaggctgaggtgggagaattgcttgaacctgggaggcagagcttgcagtgagccaagatcgtgccactgtactccagcctgggtgacagaatgagactccttctaaaaaaaaaaaaaaaaaaggaaaacctgctatttgtgacaatgtggacaaacttggtggaaattaggctaagtgaaataaacaaggcacagaaagacaaatactgcattatctcacttatatgtggagtaccaaatggtcagcctcatagaggcagggggtagaatggtatctgccgtgagttgtgggggttggggaaaacggaaagacattggtcaaagggcacagttagggaagatgaatgagttatttgggtctaatgtagcccatggtaactgtagttaacaatattgtatacttgaaatttttgaagagtatagatcttaagtgttatcaacacatacacacacacgcacacacaatggtaaatatgtgagatgatgtgtatattaactagcttgattgtggtaatcatcttacagtgtatatatattttgtgaaatatatatatagtgatatatatcaaaagtcaagttttacaagttaaatacatacaatttctatttgtcaattttatttcaataaaactgaaaattagaaataaattgagaaacaaaaaaataaataaatcacaatctcggcctggcatggtggctcacgcctgtaatcccagcactttgggaggctaaggcaggcggatcacgaggtcaggagatcgagaccatcctggctaacacggtgaaaccccgtctctattaaaaatacaaaaaattagctgggcatggtggtgggcacctgtagtcccagctacttgggaggctgaggcaggagaatggtgtgaacccgggaggtggagcttgcagtgagccaagatcgcaccactgcactccagcctgggagacagtgtgaggctccatcagaaaaaaaaaaaaaaagaaaaatcacaatcttaacagccagaggtgcatgtcatttcaaatttttccatcttgcattatatgagaagttgtttataaaatgtagatcatacaatctcaatctgtagctttaaattagcaacacatattgttattacaggtaacaatacgtatgttgaatatgcatacctaccatgtccatataaagcatgtacaaaattatttctaatggctacataccattcttcctgccctgcggtttacaaatgagcagaggccgattctgattttgatgttcataaacaatgctgatataacaataactgaaaaaactaaggaagcattctctatgctttatcttttaatcctactaaccctagaaaggagatattgttaatttctccattttatggctgaggaaaatggacttagagaatctaagtaactaacaagctgtgacattccgggcaaggatcagagctggaatttaaacccaggtctgtctgatgcttcagccaagattggtaattaccacaatctactgctgtctacacacatctattgtattttttcctgattacttcttcaggataaattcctgaaactatacttgctgggacaaaggagatcagaattttaaatctgggaaacagaaaagatggttgtgatgttcagagacgtgcaggctgatgacatggctgaagatttggttccttccggctcacttaccggcccgactggaaccgagaggtagaccatgggtcacatgtgctccaaaacggaacaacctgccaggtgaggtggctcacgcctgtaatcccagcactttgggaggccaagccaggaggttcacctgaggtcaggagttggagaccagcctggccagcatggcgaaaccccctctctactaaaaatacaacaagtagctgggtgtgatggtgggcacctgtaatcccagctactcaggaggctgaggcacaagaattgcttgaactcaggaggcgcacgttgcagtaagttgagattacaccactgcactacagcctggggcaacagagtgagacctggtctcaaaaaaaacaaaacccaaaatgttcacaaggaacagccttccttgtgagtcagagaacatcccctccccaaaagcattccagccaagtatgcaggggaccctggcagagatgtcagcaccaggaaggagactgaagacccagtgccctctccaattctccggttctttcagaccgcagcccatccggccgtctggtgctataattatgacataaaatttggggagtctttatttatatgccatacttactaaatcagtgtttcaaaactatttctataaaagaaaagtcatctttgatctctaaaaatgtaggggggtaggtggtggaggaggaaggcatgaacccatataaggaaatacattcaactggagcaaaatgcaaaaacggcctctgtttcggattaggagcctttgttccctggcaatggctgtcctccaccttgccggagtcttctgtccaggcttgttttatttgtgagagccagagccacatgttattataacttaaaatgcatatccacctcaagaaagctgtgacgtatctaccgaaagagacacagactgcctagcctaagttggcctttttttccccttcttagcctaagttggccttttcttcccttctattctaatagaccttgttctttttttttttctttttgtcactcaaaatgagtgtctgatgtactagcataaattgttaaaagcagttttaggtaaaggaagagagagtaaagtggagattttttcacaaaagccaacctcaatttatgtcaaagagggttaaaagaccttgggattaaagcaataaacttgctgctgtcaaagctaaaacccgctaacaatttagtgccaaacgcatgttgttcaatatcatttcatattatattatgtcacaaagagctgatggttctgcatcaccctgacaaggctgatttactctgaagaattcatcgacattttgcacagtcaaactgacttcattttgtttggatggacggtgggaaatgtctctgtactcgagttcgaatattagtctgaaaatctattgtggattaaagattcaggaggactgttggtctacagctttgccaagtaaggtctttgaaaggtagctatagacttttgaatgccttcattggcgaagtgcttagaccaaagactaataaaaatcaacagacgttaagttagatttttgcggcaccccttaaagtatgtgaactgttagccaactctccggaaaaagaaagttgtaggagcagattttccccagactagatatcaattatttataaatttctcaaaagatattaatcaccctattttcttaattatgtgcacccataattcccttttcccattttattttttactggaacaaactcatagttgtaattgtggacattaagatgtcttgtcgttcaaaggtgatggggcagtgggtatgtaggacttcaagtcagggagacaagattttttcctgggacgattacagaaggaatagtggctctgaaattatatgacctctgccttgaagagctagatacaaatgaggtcattttttaaaatcaaatgattgaatatactatacacagtaaaataatatttacataaatgtggatcatttatgaaatatgtatctatatttatatacttaagtctgaaagatgattcaacaaaatattgagtggttatttctgggagatgatattagaggcaaaagttgatttttttttcttttcaacctacagatattttcaaattttcttttattaaaaaaagaaaaaagatataaaattatactgaaggaattgattgtccaaagctattccacagtgaatgtctttgtaaagtgtgatccaatggtttaaatcagaagaaagaaattcctaatctaaaagggttctacaattgttgttttcaaacattgctttcttcagaatgtggcccttccatggtcagccctctgccctgcaggaaggaaaatgagtaagatgttgttgcttctacatcgagtggctgggattctaagcccaatatcctcagggcgctgtgtgcattccactgaagatgtgattgacaagctaggaggaggccagcctccaccacccaaagggtgctgaaaggcctagacggggttccaaacaactccaggtggcaggatcaagtgactccagaaaaggaaactctgtgtgtgtgtgtgtgtgtgtatgtgatttgatttcttctacaaggatgaaggagatgcttctcagacttgcctgacttctctctccagggcctcaaaggcaccatccaccttcactttctgatgggcccccagtgccacctacacctcacctgagcctcatacagcttcccctacaggccaaggggacacattgccaaggctgccttttttttttttttgaggtaagtctcactttgtcacctaggctggagtgcagcggcaccatctccgctcactgcaacctccacctcctgggttcaaacgattctcctgcctcagcctcccgagtagctgagattacagtcatgcaccaccatgcccagctaatttttgtatttttagtagagacagggtttcaccatgttggccaggctggtctcaaactcctgacctcagttgatctgcccacctcggcctcccaaagtgctgggattacaggtgtgagtcactgcacctggccccaaggctaccttctaacagaggatgttcacttcctaaaacattaagtcaataagaaagtgccatgcgtacagaacaccacgacacctctgcctaacacagtgtgtggcctcagtttccttctcagtgtgattggcactaacacacgtgtcaggtctgtcctgcagggttaatgtggaacccagctgcataaggcatagccaatgaactgaatagacaccttccagtgcctaggtagcagtttgggggtggcacagtggggtgagacgttaccgcacaccccaggtgctccctatctagggatgaactgaaaccaaggcccagatgtggtaagggccaaaagaagggcagagtaagtgtgctgcacacccagtacttttctcagggcacaggaggggtgttggtggaggaagtcgcagtggagctgtgttttggaggacaagaaggcaattgcctaaggaacactttgagatacaagacagttatggttaggagacaattcccaatagtaacccctaatgagataagagtgagtggagagcttggctttcctgtttatttctcatgcagcccttgcagaaggcagaataatcaacccatgtggatgcagacattccccttaagccatccccagccctccctctccctccttttgtcccaagacagacaacccctaaagcatgagctcatccccttttgcacactggatcctgttccttggactgtgctcctgttctaggttcctctgtccccaaagagcttctaaccatggccatgcctctgccacccttggcttctcatcccgacatccaggaattgtcctgcccactttggaccagccctgcttctggcaagcacctgaggctctcagcggcccactgggcagagacctgggcgaggacagtgccactgagggccaggaagttttgtaggatatacacccagtcatcctcactgaccaatcactcttgcctggctctctggtaacacagagctcccagaccagaaacttccctccaggagtaactgcgctggtatggaaagtggaaaagcaatagcaacaattctataacccagagcacaatgggctgatgacaagggctggaacgcacacaagagagtgtcagggtcagggtcggaggaaggtactcagatgaggagacacctggcctgtgtctccaacagggacacataaccccaagtttggccgggcgtggtggctcacacctgtaatcaatcccagtactttgggaggccaaggtgggcggatcacctgaggtcaggagttcgagaccagcctggccaacatggtgaaaccctgtctctactaaaaacacaaaaaattagctaggcgtggtggcgggcacctctaatcccagctactcaggaggctgaggcaggagaatttcttgaacccaagaggcggaggttgcagtgagctgagatcgtgccattgcactccagcctggatgacaagagtgaaactccatctcaaaaaaacaaacaaacaaacaacaacaaacccgagttcaaggggaaagcaatggaggaactgtagagaaacttgatgggatgagggtgttgggaggacaggagttggaactgaaaatatagggttggggcccatatagcttaatattttctaagaagtcttaaccttatcttctagggaccccgagttgcagaggggatttagacagagataaggatacggttagtttgttgtgttgaaaagttgcatctcattgtagttttgcttttcattttcctaacaaggattggtgttaagcaccttttcctggccttcactcgcatttttgtatcttctttggaggaacatctctgcagatcctttgcccatttttaaatattgtgatttatctttgtattgtagagttgacatggttctttatatattttgtgtaatagtctcttatcaaatatatgattacaaatattctattcatctatcatctgaactattgaagcctcctcctgtaggcctccttcctccttttcttgctcccctacaatctagtagccagagagatttttttaacataaatcataacataaacatagccctagttctccatgcaatatgattttttcaaaatgtttcttcgaccgagtcactctcctgcttcaaaaaatagatttaagaaaataaaccccttttcttgcttcccactgctgttgggatgatgtccaggacccttcccttggactctaaaggccctaaatgatttgttcttttttgcaacgccacttcaattctcaccactctgcaccatcgccatcccccagcacagtgatttgatttcagatccccaagcttccctgcatcccatcctctttgcattccagaagactctctcacccctcttccctggccaatttcctttcacctgtatcaggttaaatgctgcttctcttgggagaacatcactgaccctttcaacctaaatcaagtcccctttagacaaggacagtgctcatcaaactcatcacactttgattggaggaattattgattgatggtccttagactaaaagtgggagaaggacggggcccatctgctctgtgtctgtagaggaaagtgccagaatgaaggtccccttcggccaccaggggcccaatggagaagctgtgtccacaaggtctctctctgagactgccgtcttcccaggtgaaggcgtacccgataaagctcttatcaaaagagcattcactatatttctgtcccactctgtataggctgctcactctttctcccaacagatttggaaatcacaaaatttatgaaatttcacccaagtctttgctgacttttggtgctgaagaaagtgccatcaaaatcacccccacaattcattagtaattcatcagccttttctccctcaccctaagggacaaagaaccatgtttcttagagcttgggagagccccactgcctttgttgtttgtgtctgtgtgttttaagttttattttaagaatgattttctaagaggcctttgaagtataaagctgccgcctttgctaaacctaatgttcttgtaaattttcaccttggatctgacagtgaatcagagacagagctggaaagggcttcagtgaaggcagtgattgggaaataggtccagagggtgggcaccttgtttttgctgccttttcacaggtcacttggaaggagtactctagttgtctctttttgcttttagaaacttcccttcccaacattcttggctgccccaaacagccatgccctctgatggctcagaggtggatcatgtgacctatacttaagccaaccagcccttcatgtccattagtcctcggtgattagtttggaattagacatttgacccaagtacagccaccaatcacatgcaaacaggttgtgggaatgctgggtgagaagctctcattttcccctaagctgtaggtgagggtgggtgcagatgccagagctgctgcaactatcctatgaatagagtgcagagatggttagggcttggtctgagaaccctgccccagtcctaatgcaggggggcctagaggcagcatccctgctgccattattagttatgcaaggtggtgaatttcttttttgttgttgttgttgttttatttttgttttgagatggagtctcactgtctcacaggctggagtgcagtagtgccatcttggctcactgcaacctccgcctcctggattcaatcgattctcctgcttcagcctcttgagtagatgggattacaggtgcctgccatgcctggctaatttttgtatttttagcacagatggggtttcactatgttggccaggctggtctcgaactcctgaactcaagtgatccacccacctcggcctcccaaagtgctgggattacaggcgtgagccaccgtgcccggccgtgaatttctttatcctaggttctggccactttcacagacagtgtccttttaacgcactctaccccgtgtttctatgcctgctctccggatggaactcggctgccattcgtccatgcagctgtgtgcacgtgaagggccctctaccaggacggcacggtcctcaggcctgagtatcctgcggcctgctgtggtctcactgaccctcctcacccaggacaacctccagctccctgtagccacctgtctctctcaactgggcagctcttgcattttgagtgggttgagtcatcctcctgtggagctttcacaggtgctgcgaggagccaagtagtctacctgtctggccccaccactgtgacaaccttcacacacatgtttgatgggaccatggcatttagagcctgcatccaccttctcacccttatcttccagcgtcctgccttccttcacaggacagaaggagagttggcagccccaggctcactctatcccatggccgtccctcctgaggcttcacttctgcaaggtaggagcctggagatgctgccctagccaggtaaaaggaagacagagacactcatctacatgttatcatagtcccttccccgaggctgggaaaggaggattttattctccaggcaacgtccactggcaacgctgcccaggcagctggtccctagccccactggaggcattccaaccacttaacacagtttttcaatttccactgtttttgcacatacatttccatccctgggatggattgccacggggctttcctctccaaaattctgatggatggcatttttaccctgcaatgatccctaagttaaagtgatattcaccaatatttattacgtggtaatggcatggagcaccagatcaaaaattcatggcaagcacacactgcaacactctccctgaatgctctcagagcagatatatgattctatggatatgcacatctgtatgtaagtagtgtacgcatgcgtgtgcactcatatacacacacacacagcctgggccacatcttgtctttcaactccggtggcactacagtaacaaaccggtctagaagcaggcctgagagacaggatttctcaaccaagagatgggcagatgtgagtttaaaggaagagccagtagcaggaggttcagtttctcccactctaccaccagctgggagttaattcatcagttctgggactcattcaaacagcatggcatgacactggtggaaagcaaacacatcctctgaatgcctgctgtattctgcagaggagagcagggagctgagcctggtatccggagctcaaggcctgatagcccggactcacatgaaggccagaggatgagctcccagaactccacgagtcttggcctaatgtcttttagccaagagcatttggtgaaacaaaaaagaccctttgaggccaagcgtggtggctcatgtctgtaatcccagcactttgggggggccaaggcaggggatcgctcgaggcagggagttcaaaaccagcctgggaaacatggcaagatcctgtctctaccaataatttaaaaattagcctggtgtggtggcatgtgcctgtggttccagctactcaggcaactgggatgggaagataagatcacttaagcccaagcattcaagcctgcaatgagctatgattttgccactgcactccagcctgggcgataaagaaaggccctgtctctaaataagaataataagacccttcacaagcctcaacaaagatagatccaagatcctggctcctcactccacaggtagccagagaagaccctgccatctcctgagcctaccctaacctctcccactaggtttgatcctctctcctttgtgtcctgacccacatgactgcctgcacccatccccaccttggtaacattccccaggaaatcattttagtgcctctttcctgcccttatgcctctaatctattttgattttctgttactgtgcctaggaatgccaatgcattgttgaacagaaggggctaggcatcagggacagcatcccacctctctggccatcttttagccattaaaatttgccatcacctattgttgacctgccgccgagctccatggaaagaacacaagatacgtattgcaatggtgtgaaaacatttggctccaattttttctatatatatataaatttttttctcccttttcttcctccttttgacccacagaaaagagaaccctaagtccccacactctgtcacttcataaatctctctctaattgcacccttggggtctctcttggccagtctttcagaagaagggctacctggccttccaaggattggtttatcaccttagttgctttttgccaggttttctccatcacaagagtcttttctttaatgacctgagctatttacaataaggaaataacgtggtcataatcagagctggggtgattttgctttatacaagcctctctctctctctctctctctctctctctctctatatatatatatatatatatatatacacacacatatacacacacacacacacacatatgtatatacacacacatatatgtatatatgtatatatgtgtgtatatatgcatatatatgtatatatggtgtgtgtatatatgtatgttgtgtgtgtgtgtgtgtgtatgtataaaaggcatctatctgcccttctccacctcctgaaatattcctcaactgagatttccatcaaacccaccaatgacctaggagtatctaggtgggtctccttgcactgttgaccatggtgagttcacttggaaagccctgctctagggacaatgtgcatcctattctgtgcccccagcatgcatatgcccaaatcccccaagaatagaagaaagacaatgcattgctatttccgtctccaaaattaccgtggatggcattgataagtctgaaggagggagaaaaggaagaatagaaggatagggcgttagcgagagggcaaggagaacaaaggaaggcattgttggacaataagcagcaggtgaacaggaacactttgtccagagggcctccacagtggggagggagcaggtaggaagacagcggtacttagaatcttagccagagttcaaattatagggcactgtttcattccccaaatcaggtatttagaaacacagatagagggaatccctttccaggcttccattgtctcccataaaagcatgctggatgggcatagagagaaaaaatgaagcagaaactcacaaaattagactcaacatgaatttgatggggtgtagaaacgtcctgcaatcagaggagacatgctcccacctttaaacatgagagggctgggctggcgttgctgcctcaaatataggatgaacttgaacttcagataagcaatgaacaattttttataagtataaagtatgtccaaatatttcatggggcacacatataacaaaaagtattggttgtttatctaaaattccattttaatctggcttttttttttccttttgctaaatcttgccagatttagatcaggcaaaatttccaaagcttctttcagtttttccattctctgttgtgtgtccccaccccaaggggagagccactggggcctcagaagaggcaggggacacaagaagataagaagagttctaggatcagggcagcaaattacggctgaggctacacgcatagggaaggggttgttgaaacaggcaaaaccaagtgtgccaagatttgctttaaaaagaaaaaaaaaaaaaccacaatggctcacacaatggctcatcagcagtgcggctgacccagtgagtccagacaccacaacctacggcaaaatctgaactgtggaactgtcacggagcaactgggaaaacatgaattcatagttaaaccgataaaattctgtgtaatctgtctttgtaaccccagaaactgaaacttatgcttaaaaaaagactaatattctttttttttttttttgtctaaaccactaattattttacctggaggaaattcctctattattttcactgctggaaaatcacagggtggttagtactgctagtacctgtcacagacagacgtaaacaatgcgatccaataaaaccttatatagcacattgcacacaatagtggcttgccagactcacccagtaaaacaaaacatcaaagcagaaaaaattaaccaaaaatagcttgcacggggaaacgtggtaagcgagtttgaagactgaattcctaatatccctggacaacagacttcactgatacgagatagtggaaggaaagggtcccggggaggggctgacaatgagctgtcaagatctgaccgcaactcgcttctcctctgcacctgggttcatagcatagtcaggccactaatagtcctgcatgtcggttagcacttacagtttgcaaattgtttttacatgcactggctcattgggtcttcccccaatgctgtacaatcagataaaatcctgccattctccaggaactgactcaaccaaaaatgctcaccacaaaaatgctcagcctagttggggaggtacccatttatcaaattgccgtactaatgaaaatccaattatagacagagataaattaaaggacttggatctgactttgcgcagggtgataggggaggctccctggaaaaggtgatgttagacctgagctcaaaggcaaataggatgggggaagcagcaacttccagtgaaagggcagagtcctgagcagggaaagcctgaaggtatgcagagagagtgaaataggcaactgtgggggtggaggtgggcagaggaagagaggagaagagaggggcaaggcagagaaggaggatgagcaggtgccagaccatccagggccccagaggccattcccagggtttgggaagccacggaagggtgtttagcaaggaggtgagagtttcggatctcctttgcagtgtgccttctccacttcacagctatgatccagggtccggagccctgccttccttctaggaatttataagtttcctaaattatcaagagaaagtttggggctgggtgcagtggctcgtgcgtgtaatcccagcactttgggaggccgaggcgggcggagcacctgaggtcacgagtttgagacaaacctggcccacatggcaaaaccctgtctctattaaaaatacaaaaatcagctgggcatggcagcgggcgcctgtaatcccagctacttgggaggctgaggcaggaaaatcacttgaacccgggaggcagaggttgcagtgagccaagattgcaccactgcacttcagtctgggcaacagagaaagactgtctcaaaaaaaaaaaaaaaaaaaaaaagagagtttgataacaaagagtgagtcagatgtcacttaacagagcctcatttggaatttggaagtgcacccctcctatgagtggccaacgggcaaagctaactgcagtggaagaaaagtccttagtggatgccaacttcttgaatctagtgggaagacaatcaatgtttctcctcaggatggcacagctttgacctttgctcaggtggacactagagggcctcttggtcattagttatgggtgagaatcatgccggaggaggttaggctgcctctgcccttcattcttggtttcctggaggtctggtgtcattgttgcaagccccatccacctttctttctcttgttacactcattcatctctgtacatctcctctatcttaagaattctttcaagtttggaaagtgagaaacttttctttatttataagcattcttccaaatgcctaagttcatctttctgaggcctaattttggattatccatagctagaactaactttctttctttcttttttctttttctttctttctttctcttccctccttccctctttcctttctttttctttcttccttccttccttctttccttccttccttcattccttccttcgtttgtttgtttctttctttctctctctctctttctctttctttcttcttcttcttctttttttttttttttttttgagacaggatccagctctgttgcccaggctggagtgcagcagtgtgataatagctcactcactgaagcctcaaactcctggactcaagcgatccttctccctcggcctcccaaagtgctgggactacaggcatgcatcactatgcccagctaattttaaatttttttttgtagagacaaggtcacattctgttgcccatgctggtcttgaactctgagctcatacaatcctcccacctcagtcttccaaagtgctgttattacaggtgtgagtcaccacatccagccaaatgttttcttttttctttgtactctgctagtatcattctttttctgaggcatcgaatataaaatgcccacttgactaaatgggcaaagggcagggcttagcaggaaataactttattccaacacaaagaggttttccatttgcaaagatcacgctggaggcatcaaagagaatggtggcatgacggtaaatcaactggtaattactgaatagctctggtggaaagagatggtaacttggactgggatgattgtgttgtacatggaaagaagaaatcagattccatacagattatgaaataagatattgagactaagccatattttggagatagtgaccatgaagagagaggaggacctaacaattctgtttgacatttggatgaggcagggttgtcttcactggaaatggaaaactagagatgagagttacttttgagaataacgaccaccagtttgattttgaacacactgagattgagacgactttgaattatttaagaaaagatggaaactagccagagatattgatccagtgctctgcaaagaggcatctactgcagataaaaatatggaagttatagatatatgcatggtaggaggaataagttcaagcaatctatcgtatagcatggtgaatctagcaattaacaatgtgttgtatatttgaaaattcctaagacagtagattttcagtgttcttaccacaacaaataataagtatgtgaagaaatgcataccttaattagcttgacttagccatcctgtaatatatatgtattttaaaaaatcatgctgtatgctacaaatatataagattttaatttaccaattaaaataaataattatggccagccatagtggctcacacctttaatcccagcactttgggaggctgaggcaggcggatcacgaggtcaagagatcgagagcatcttggccaacatggtgaaaccccgtctccactaaaaatacaaaaattagctgggtgtggtggcgcaatgcctgtagtcccagctactcaggaggctgaggccgaagaagtgctcgatccttgtaggaggttgcagtgagccgagatcgcgcctctgcactccagcctggtgacagagcaagactctgtctcaaaataataaaataaaataaaataattataataaatacaattaaaaacggaaaataatggtaagaaaaacaataaaggagattacccaaggaaaattaaaaggggtagggccatacctcagacagatctcttatttaatggttgaatcaatgagtctgcagaagactgaaaggggatgctaggatggtaggaagagaaccaagggagtgagtcatgacagaatctaagggaacagatggttccagtgaagaagcaggcgtcatcagtgccctgagctgctaaggggcaagagggtaaagaatttaacacttgttggatttagggcatgaagggtattggtgaactaatgtctctcttggtggagggatgtgggaggaagctaattgcatgaatgtcatcgcaaatgggaggtgaggaagcaggaacaagagaacacagacagtgcaggttattctcactgtggcagacaccattcttgccaccagcttggctgtggcagggagagaacagcagggcagcagcaggagggagatgtggcatccagggaggtgtgcttattggcttgcttgcctatttgtttgaagacaggaattttgaggatgttcgtggtaagcagaaaggcccctgcagggggaagagtacttgtgtggataaaaaggggaagggacattttatagatcatgttgggtttttgttaagttaggaggggtgggacctaaagcttaggtggtgaccatggggaagagaattcaccccagagaaggtgaggagcatcctccatcccatagttgagtagggaggaggacgcagatctgcacaggtggaggaggcttggggcatggcaccaggaagctttgtctaagataatcacggtaatgtaagaggacatgtcgtgtgctgagtggtggcagtcaaacatttgaaaggaagagatacatttcagaataagtctataagcaagaaagcaaattaatttggtaagtgcagcagaagagcctcgcaggtttgagagatcttctagggttggtgactatggatttaggatagaaatggaggagcttgtggtccaggagtgggatgttgaattggcctctgtctgtttgcccaaagcatttgtacattcctgacccatgtaaactttatcagtctaaataagatgatactcttggaaatggttacatgtagttcaccctatttccccaactagtatgcacactctttgaaaacctaacttctctgccacttgtcccacccatcttcaactatcttcctacagtttcaggcaaagactacatcgtagcatttttgtaaataaggtaaagtttgtgaaagcattacaaaaacttggcagtgggcaagataaaactgagtacttaaattattactgcatcaatccggaagcctaatatggatgatattaacaacttactttttgagagttttaattatttttcagattgcaaattccattctcacacagtattttatttgttccgaaaatcactaatgaggtgggtatttttttattttatttttatggaagctcactctgtcatccaggctatagtgcagtggcaggatcccgtctcactgcaacctccacctccttggttcaagcaattctcctgcctcagccccccaaatagctgggaccacaggcccatgcctccacacccagctaatttttgtatttttagtggagatggggtttcaccatgttgccaggctggtctaaaactcctggcctaaggtgatctgaggtggatatttttgaccccattttcagtccaggagcctgggtggctagttgaaggtcagagaataaagatgtgtcaaaactgaaggtgcaatccaggtcttgggacatcaaggaggaagctggtttcatcagtgcccagagatgccaaaacgtgagaatattcaatacggattaatgatcctcaaagctgacaatggaagatgaatctatagactctttttctttgtggataccaagcatagttttcaaatatccaggccaactgtcactacactacactacacctggccacacctccaagactgagagatgcaaagaccgtagaaaagagtcatcagcagtttcctcacctcctgcaagaactgctgtggattgtatttgtggaaagttgtttcttcatctaatgctttgggacaacggtgatagaataatagccctgcctgggggaaaggacattttcctggatgtgtagatgccggacccccagggtcgatgcctggccactgtctatgaatctaaagctaatctcagagagcttgaggctggtcagagaaacccagtaaaggcatcatttttccatgagctttacgctaaatgaattgtccacataagactccccttacatctcccatgtgcattaattttttgccaatattaacaaagaaatgtccaaacaaaatgccaacgacttgacaggtctatttttcagagataaattggaagaaggtatccacttagaaattgggacattgatattgaaaggggaatgtggatcttgtttatcttcaaaagaattctttaaaaaaaaaacattgcaaatccagtaatccacatcacactttagaagatgtccttgagtctcagagggaaattagttgtatgcattctaagctaggatatggctgggtttattccatttcttaaatgtctaaaaaatatcaggaggatctattaagctaaaggacccatgttaatgcaacattagggaacttgattacagcccaacactcaggaaaatcattttcagcttcgcacatgctacattgcacatgtaatattttctgtttgatgttatttgtcatttattaaatgtatatattaatatgaagtgttccatttcctggctatggggtgtttaaaaagttcaatctcacttcacactcacaccgaagaaatctcatttccctacccctttcctgagccaagattcctctgccttgctcaggaaatagaatgctcattctgtttattgagtgcttagtgtgctctgggcattaggctatgaaatacgtcaggaagaccataagcataactgaatagtacacagcctctgcccttccgaggcttacattcagtggggagaaggagacacatagacacataaatacagcagctgtcgtatttaactgattaaatacaacatgccaaatacaataatgtaggcataccaaatgcatcaaggaataccaagaaaaaatgtattcactctggtggggggttggagaagacttaggcactagacagcatctaagctgggcatatggagtagtcattctggttttgctagaaagagaaaaatataaaaaactattgtgaacatttttttttaagtgacagattgtcaaagtgagtttcttatggatttgaggtctcttgaggagtcaactagatacacatcaaaacaccaaggtgtctgggggactaactacactgtatgaaaaataggcaatggctataaagtaaaatctgctccacaactcctgatactgtctttggagaatgactaaaaggtctaaagagaagagagtgaaaagattcataacaaggtttcgttctgaaatagttattaacctagagtgaacccccttacacccatccccctgagtcaccttcacccaagagtacacagtgaagtcaggacctcagggcactttcaccaaggatatggaaaggctacccaatgaataaagttttttgtttgtttgtttgtttgtttgttttgagacagagtctcgctctgtctccccaggctggagtgcagtggcgtgatctcagctcactgcaagctccacctccggggttcacgccattctcctgcctcagcctcctgggtagctgggactacagatgcccaccaccacggccggctaatttttgtatttttagtagagacggggtttccccgtgttagccaggatggtctcgatctcctgacctcgtgatccgcccgcctcagcctctgaaagtgctgggattacaggcgtgagccaccacacctggcccctcaatgaataaagtttaaggagatggtagttaacaaaaaataaagtttccttttgattaggtcacaactcatgcttacttaacataccaatgacatcaaaccatgtaaaacttgtattgacatttaaaaacatggcataatataccatgctaaggtttaactattttcctgtagtgttcattattcatctatccaggcttttctttctacttataaacaatgtttccataaacatatttggttacatctccttgtgatgatttctactgctttgctatgataaatcctggaaatgtaatcgcagggaaaagttttcttttccaaattggctgactcctttgaaatatttaaatagtctttttttttctattagatggcttgaattttctcattgatttataagcattttcatgtatttttgacagttgttctcgtcacatttgaggcaaatattttctcctagtgtcacctttagattaagatgtttcctacctacatactgtgttttttaaaactttggcaacttcaaatttatccatcttttgttttctacttttaaaaataattattaaaataagactctataattcttttgatatgcttaaagttttattttgtgtgtttgtgtgtgtgtgtttaggcacttcatatgtcttaaattcattatgtaaattttgtaaattagatatctaacatatcagactccccatttttaaacacccctttcaatctccacagtgatggttaatattgagtgtcaagttgattggattgaaggatgcaaagtatcgttcctgtgtgtgtccttgagggtgttgccaaaggaaattaacatttgagtcagtggactgggagaagtacatccaccctcaatctgggtgcacaccatctaatctgctgccagtgccgctagggtaaaagcagctggagggacgtggaaggacttgactggctgagtcttctggcctccatctttctccgtgctggatgcttcctgccctcgaacatcggactccaagttcttcaacttttggactcttggattcacaccagaggtttgccaggggatctcgggccttcagccatagactgatggctgcactgtcggcttccctacttttgaggttttgggactcggactggcttccttgctgctcagcttgcagacagcctattgtgggacttcactctgtgattgtgtgagtcaatttcctaataaactcccctttatatattcatctatcctattaatcctgtccctctggagaaccctgactaatgcatccactaatttcaaatatcagtgtatctcatgataacttcaatatacaggagtgtctatttctgaaattttgagtctatttcatctatttgtatattcttaagtaacaccacacttctttaatgtttaaagtttcataaatatgatatcagatggtgaaagtccatccctttgatcacttttttcaaactttcatgtctgttaatgagcagttatcttccacttacatttcagaatttatttgttgatttgcataataatatcattgtcattttgtttggggttacattaaattttcagataattttggagagaggcaacattttaaaaatagaaactcccatccaaaaatagtaagtaaccctccatttatattcaagtcaatttattaaaatgttagatgtttctataaaggtttattatattatcattaaatttgtttactcccagctacaatattttatagattttttttattgctgtttggaacaaaatgtgttgtacttggttactgctggtacacagggaagttttttactttttcatattgatcttatatccagccactcacttgaaatcttatatcaatattactggattgttaattatctcaattgttaatagattgaattatttaacatagttaattatattatcttcaagtagagacagttttgtctgtttccaactttgtttcctcccttttctcccttgctaattggctaatacatctagtaaaatgttgaatggtagcaagcatttttatatttcctaactttaatgacatcacttaggttttaccaatattttgtatatttgctgtactttttatcatattttttctatcctaagtttattattttatcacaatatggtggtagtttttttttaatgctttcagacacctattatgatgataaattaatggttttactactttgctttgctaatatatatagtaaattacattaatatatcttgtaatgtagaaatagccaaatttatacctccagccctaaattttcccttggactctaaacattgtataactaactgcttctatacaactcagatgaacaatacacttcttatacataatatagcccaaaagcaaacatttgattttttacccaaacccctttctcccttagtgattccaatcttagtcaatggcaacatgacctactccgctgctcagggaaaatcactggaagcatccttggccctcattctctgtaatcggtcatattgaatccattagtaagccttgttgtcaccacattcaaaatttatctggaattgcagcctttcatcttccatccctctagcccaaatcaccagcgattcttacctggttggcttcagtaatgtccagctggtctctatgtttccatatttgttctgtttattccattctcaaaccagcagccacagggatcctcctcctgtcagctgctgaaacattcactctcttcccaccacatttaaaataaaatctaaaattgcttccagggccaagaaggcacaacaccatctaggagctgacacttcctgacattatctcttatcacttttttcctagctcactgacttcaactacgttactcacattatgattccttggtgacaccaagcacattctcattgtagggcctttgcagttgccgttactctgcatggaagactccttccacagatactcaacacaactcttctctttacttcacttctctgctgaaaaatcattctatcagaaatatcattctatcagtcttccttgaccctgcagtcccagctggcccatagtcctcattttctatttctttgttctgcttttgttttcatccctgactttattttatgtattttaatcttgttcattgcttgtggctcccattatattaaaaattccataagggaattatgtgtttaatttactcactactctattctcaccgactagaaaaattaaaatgtatccagactttgtgaaatgcccagtgggcaggaagcaaaccacccccatttaagaagcattgcattgaatgcttattttaaaaataaaagaacaaatgagtcaaatcagcaatcttatcttctgatggaaaagaactagaaaagaagagtaagttaaacccaaagcaagaaggaagaacataataaaaatcagagtagagtgacgaataaggaaacacagagagagagagaagatagaaaaaaaacaataaaaccaaaagctagttctttaaaaaataaaacaacaaaatgtataaacctctagctaaagtgaccaagaaaaagaagatataaatgaccaaaactgggagtaaaagcaagaacatcgctagagactcaaaaataaagctgagtggctatgttattattattagacaaaacagacttcagaacaagaaacattaccagagataaagagggacaagacagttcataaatatgtatgtacacaataacagactttcaaaatacataaagtgacactgacaaagctgaaagagaaaaagacagatccaaaattatagtggaagattttaacactcctacatagtacttgatagatcaagtaggcagaaaatcagtaagaacatagaagaaatgaacaacactatcaactaacttgacttagttgacgtttatagaccgatcaacccaaacagcagaaagcacatacttttcatatactcagagaataataactaagatacatcatattttgagccataaaaggattgctaataaatttgagagaattggcgtcaaacagagtcagttctttaacttcaacaagattagatataaaaagcagaaaaaatatctggaaaatcagcaagtatttggaaagctgaataatgctcttctaaataacttatgggtcaaagcagaagtcacagggaaaaattagaaagtatttttaacagaatgaaaacaaaattacaatatagttggccctccatatctgtgggttctgcattcatgaatttaaccgaacttggattgaaaatattaacaaataaaaattgggtttgtactgaatatttacagactttttttcttgttgttattcccaaacagtagagaaaacaaccatttacatagcatttacattgtatcaggtattataagtaatctagagattatttaaagtatactggaggatgtgcatatgttatattcaaatactatgcaatcttactttagggatttgagcatccctaagttttggtatccacaggaggtcctggaaccaaatcccatgggcactgaagaagaactgtatgtcgaaatgtgtgggatatggctaaaactagggatatggctaaaactctgcatagagaaaaaatgtacaggtttaaatgcttgtattagaaaataataaagttccgaaataaattatctaaggtctcaccttcaaaatttagaaaaagcataagttctagagatccactgtacaacatcttgtctacagttaatgacaccatattgtacatttaaaattcggctggaaagattgatcctatgttacctgttcttactacaataaaaaagaaaggtaaattaaaatccaagtaagtagaaatgaaaattaataaagacaagaccagtcaaaactcaataataaacacacaaacaataaagaaaaaaaaaataaaactaaagcttttttttttggaaaaaaaaacagtaaattgtataaggctctagctttactcattaataaaacaaaagacagagatcaacaataatgtaaatgaaagaggggaaaccacaccataccctacgaatttatgaaagagaaattactaaaactgactaaggtagaaatggaaaatctgaatagtcctatgtatcaactaaatatactgaattcattaattaaaaacctcccacaaaggaaactccaggcccagagggcttcgctggtaaatgctatcaaacatttaagaaggagaataccagctctacacaaaatgttgcagaaattagaaaaggaagaagcactaatcaatttattttataaggccaacattgtgcttacaccaaaaccaaaaatatatatattacagggatttaaaaatttttttaaagctagacattaactttctcatgatcacagatttaaaaatccatagcaaaatattagtgaattgaattcagtaatatgttaaaattagaatgcatcatgaccaattggggtttatcctgctgggaggataatttgcaggcaggccctacttcccccgtgatgggtggactgctttgttgcacaacctccctgtctctctggaccccaggcctgcaccggccaggctgccctccagccctcccatcgagtgagatctgctgcagctcctccccaccttaagcatgtccaaatcctgacaaccagattttcactctgtcttttacacaacagtgaagtttgatcaatgcttcttaatctgtggataaacagtccttaaaagttcaagagcaatcttgttcaaaaagcagcagctcacattccatgatgaatttaatcaaggtgtccttgttcccatcctgtaccaacccgcctaactcatatccatttttaactttatttctctttttaacaacatactcaatgcagggaagtcagaaaatttggacatcaaacatcaaaatcagaagaatcactcaagatcccaccaatcagaggtgaccattgatcctattttcttatgcaaatttgtaagttattttctgactttgttattctgtttggaaaggatttttctgaccctcagaaggtaaactaatttgtgtctcttatcctttaagcaatttcctgagaataatttcaccatttaataaagcacactgcatgtgtaatataataaatacttttatagattttggtatatttatgatcctattattctctttcattgatctattttttgtcattcatttttaaacaatatgatttcataatatgttctaatacattatgtgcccgatttccataaatattttttccaattttttctcattttcaactttcattcatttcacgtttatttttctagataaaaggtgtaaaacatttttacatttgccaaaaatttatttagaagattgattcaaatttcattatatttatagattgacttaaggaagaaacagatttccaattctgtattcccgtttattaaaattctgtttttattttctcagtaatatttttcttcatttcctcatagatactccatatttaaaaaatactattcaacatttctatttaataattgtgtttgttttgaaatatagtataaggcaactaaacatgctcaagaagaccctttgctggccacagtgctcagtcatctccaggcagtgcaggaaaactcttctctatggaattccagcactcaggaaccttttcccacctcctgggattccacagtctctcttgtatgttgtaccatctttttgctctttagtactgcaaagttgacctctatttcataaacttctgagcaggtatagcaagagctagaaggagacatctgtccttatcaaatgatgatgtaaaaaactgcagctactggggggtaatttttgtgttcctgacacagcagcatattttgcatgagttttctttgcattagtcctgagtgcaataaactatgatcactgtcttttgtagagaaaagaactgaggtttatggggttgacgccactggtataaggcagtctaagcaaagagcccatacgcacaaaactacacatttttgcccccttcagagtaaataatttcaagactaatgtggatttttcctgcaccatccccttccagcagggttgggagacaaatctaccataatggatgtcctcgtccaatacttcttcaatacttttcctttctgtacctctaaaggctctgatttctctgtaaacatgtagatgagaagcctatgtaactaaagactaagatgacacagatggtaacatctccctggagtcacagaggtctctaaccaccttctttattactaattcttagatgactttctaacgtattttttcttaggttgcacctacattgattgtaggttgcaatgtaggttgcaatgtaggttgcacctacattgatgcaggactctctgcatataaccattctgctatactgccttttgatgatgaggttttttttctctcccagtgttcatgcctttatttctttttcttgcctgatagcattggctgtatctcccaaataatatcaaataataatgctgatagctgtcattctttattactcttagcgctctctctctctctatatatatacacacacacatatatatatattcaatgtgttatatgtgatggtcattaataggttaagcattttttacaagtttccaaaatatctttctaacttaattcttttaatagaaataatttttaaattttattagatgtcttttggcaattgagaattttttttgctctgttctattaacatactgaaatacattaatagattacctaatattgaatcacctttgttcttttaagaagaagtttccttggccatggtagcattttgtattataagactgatttgttgctcatattctaacacttgagaattaaaatctatactcctaagtaagagattctgtggttttctttttaacttttgtctctggttttaatatcaatactttgacaactttcttaaataaattatgaagcacttaacttagggctctcctgcttattgaagttttgaatagcttgcccatgtttgaaaattgaaaaacattttagaagacagtctcctacaggtttttgtgtttattcttcattattatttttttaagcactgggtatatttaagacctattaattctttgctttcatggattagagtttgtagtgattccattacctttattttctaaattttcattagttacagatttttgggcccttttgatcagttatttctcctccaatttagaaggcatagatggagctttgctaggatatatactatttaatatctatattaatattaatgtagatattaattttcttagcaagaggtacctaccatcagacagaacaatttctagcagaaattcctcaagatttatgacatgcatctttaaactctgacagtgctttgatcattttattgagtcctgggaaagagggtcagagacgacacagcaatccccatggtttccaggactctgctgtagctttaaactcttcccagtgttgatttgacttcctaactagattgctcattcttcagttctgaatccaacactctcttcctcaaggagacatttcctgttacatcctcggaggttttgtttcttccaatatgcccttcctggcatcctggacatcttttaaaataatcttccttcccctctagagtgtaagttccatgagatccagcactaagtctgccttggttgctatcgtgtctccagggcactgcctggcacctggtctttagtaggctgtccatacatttttgtcctatgatttctagagggcagggattcttaccatcctttgtctcatttccctggatgcagagcagatgcccaataaataccacatttcagaaaaatacatgggattgattagtttttcatttttcagtgactctaactctttagaaactgagtttttctctcctctactttatgactcaacagctgaaagtgatccacagagatgattgggcctcagcctctgacagtaacatgttgatgttaattcagacacataaatatctaattttcaaaaaaaaattccaggaaaattgattttttcttagcattttttgagttctccttaattgtcacaaatatctctaagaaaaaaaaaagagttcttccttatgtctaagcttattcctgcatgttgcaatgtcaagacactggtctttgttttctccccgggtatttgtagctattcctgctgtaattacatcttggccaaagttttacttgtctgacagtgagagagacagaaagacagacagcatgttcacctttaaactcaagggaatccctcttttccctcggaaggttaggggcagatccagcaaacagaattcttagcaaaggcaaggaatcacacacagaaactgcatcacaaaattgtctcctgaagtcatatcagccttccttcagaacttgcaaaggccaagcagacaattgcctacgtggcttggaaaatttctgacagactttctttcctccaattattttttcttcacagtttaaattcaggtctcaccattttatctaaggcactgatttatagctccgaagacttctgtggtagcatccccacgtcaactgtcatgacacagtgagccacggttagtctctaatgtctgcttgcattagcaaagttctgagtgcatgatacttaagactggtaagtttggaaggagaccaggcagtcgaaaatataggtgcttagtagactctattctcaggtagcacagggtgtcttcttcaggggaatatgtgtcatcatgaagtacaaggaagtcaatttcttagaaatagaacagaggtccatgcaggatgagagaatgctcaaagttgagacagaggggcctggatgagtctgaatctgtgattgacagttgcaaagaggaattcctcttacttggaaagatgagccccttatattgggattcctgcccaactctgtattaagacggttcacaggttcatggcttaccagtccctgggggcctggtgaccacccgaagatggttaagatggttctgtcctaaagagccctgcactggctttgaaaaacagtaagatgctctctgagataccttctgatacaattattctagaatgacaatgaccagggtggcccatactagaggctctaaatggatataagaaaacatccatttctctatcagtcaccaaaacacaggcttttagtggaatcctttagagtatgtgttggccatcctttaattgcccatcaaagtatccatttccctcacgttctttcccaatatcccatcttttccactagggttcttatggttctagtgaagataaatccatcctcagctttaggcatggaacaaaggaccccagctaagacaaccaggatactccattgtcctacacagagtgattgttttaatgattggaactcaccttggctcatccaatcaggggttgtatgggaaaagaaagatgtccagggaattgtaggcagtcaagttcatctgtgaagatgagatgagaccaatctataaaaggcagaggcgagacctcagtgatgtgtttgagcctctagattaagcctgaattgagttctgcctaatctccagacattaattaactgataaattctcttccctgtgcaagccaggttgagttgggtctctcttctttgcaaccacatgtgctctaactgatgagcttctctatgatgccatggctcccgtgcaaagtcattacatgctttcttgaacatttatttcaagatttgacaaggggcttctcctctccttgcgagaaacacaagcagatagatgtctggtttgagcgctccctggcggaggcaggaaccccacctcacaccggagatttctccttttggtaggcagggaggctgaagatggaagccccagcactgggacaccaacatcatacccctccctccccctcatctggccaccagcaaccctgtcatttccctgccactgggctggctcagacaaagctgtcgttgaagagattacagacagatgctctggcaggattcaaagaccccgtggaaggaaagcagtcaggttttctcttaagcgacagccatcattttcggcaggcaggaaaattgcaggtttgcccttccccagtgcaagctatctgaaggtaaaacaatggtgagcagcatgcgcttgcctcaaggacggaggggagaggagagaaggcaacagaaggactccatctcctttaatttattttaataaagcatgggttttccaaaaggccaaagggcctcatttgccacagcatggttgggatccgccaacagcttccccaaaccgcctctttccccataattcaatcagagctgcagatggaagcactcagctggcctctccatgttcttggcccttcctgaatccctcctctcctcctctcacggcctccaccagagaggaaggctcacgcctgccaacaatcatgcctcctcatccttttcttcctccacatccctgagctcccatgagggccccacccagggccttccctggccgtcggtcctcagtcttctcagccacaaacaaggagcaggtgcatatcctaggggggaacaggcaggagggtcgccaggcaatggagcaagaccccaggtcctgctactggagacaggataaatacctggaagatgagagatctgcagaacttggattctcagcccaaagaccaccatgcatgtcctggggagagttctgagtcacagaggatcagcgggcctgtgcaacctcaggacaccgctagagtggaaagcttcccctgtgggctctcctctcactgaaactgtctgggaggagcaaggaatcagagttgaaacttcagcaggagggaagcagggacagggctgctgcctttgttctctattaatgaggaagtgaaggcaaaggactctgcctccagtgacaacagagatttctttaatcaggaccttattttctacagccccaggtagaaaaattaacccatccgttggctgtaaatgaaccaaaatcccctccccaaggtgtcccattttgtctgacttcttgctacttctgctctttaggaaaggtcgataaggtggcattcgtgtttctgggctttgaaatttggaggcaatctgtgatgaaagatgaagaaaggaaatagtctttaagaaaattccagatgtctggagcaatggctgagactagggggtggggatggtcagtactggagtggtaaacggtttcagagctcagaagtgggagttttattactggctggaaaggctggcggtggtagtcagtttgagattgttctgtattttttttccactgtcaccccaagagtgtatcatcctcaaaattaattcagtgaaactgctcactctctcctgcactcatacctcccaggctgctacatctgcctctctctgtccagggaccctggacccctccactggcctcgctaaaatgtctagctctgagcatctcagacaccagcttgtgtcccattgtcctccatatgggcaggatgtgccaccacaagccatctaaaatgaacacattctgaagaatcaaaagaagagcccaagtcggggtcaccccatagcctagtttttaaaggcatcttgctgtgaagaggtcatatcctggtgtaatgctggatagttcttttctgagaccagccaagacacatagtggatcatagcaatgaggctgcatagagaagcttcctgggagctagagacttcagacactctccattcatctaacccaagcatttctttctttgtgcttaagcacacttgtactacagagcaaattgggtccatatgcaccatttcttgtaaaccccaagtaaccacatgctgttttctggaccagtttaattgcccatgaaaccctagagttgtctgtggcatggaaggcacccaaacaatcctgtcaccatcactgtcacagaccacacccttggcacgtgggtgggcaggcatcactgctgacatgtgtggcttgctgactttgggtccaaaacagaagggccatcacaggcagctcttatctctttctatttcttaaggcaatgctgctataaatgcctggattaggagtgtgaagacctgatatagccccagttgtgagatctaaggcaagatcttcaccttctgaacctcagctccttcctacttcacataggtctcatgatacctgcttcattacctcgacagttcattgcgaagaggattgtgaaagacagaagatgcacttctatcaatgcctgcaagggtgaaagcccaggtggtaaccaactgccctctctccctaagacctctagtcaacagagcaatattgtcatttgacatcaacaccatcaacagcagcagcgttcactcactgctttaaagccacacactgctttcacctggattatctcaaatattccttacaacacccaagggaagacagtgggtgtgtttctgccttccattgagaggaccccacggttcacggaaacccagtgaggtgcttaagacactatggcccatggagtgtcagggctacacccaaagccagccatgcactcttgacctgtcttcttcaccactgcatttcctctgctggttcacacagccctggtaccacctcagagacagcaggtgctgagatggtgctggagatggcacacctgccctatcagctcagtttcccaccctctctcattgctgcagaccatactgtcgcccaggacctctgttctcattgcgtctgggaaggaatgagccatctatccaaagttttgagattgtctaagtctgttttctgttgcttataacagaatatctgaaaccaggtaatttataaagaaaagaaatttacctcttacagttgtagaggctgagaagtccaaggtctaggggctgcctctggtgagggccttcttgctggtggggactctctgcagagtcttgaggtggtgcagggcatcacactgcaagggggctgagtgtgttagctcagctgtctccttctctccttataaaaccaccagtcccactctcgtgataacccattaattgttaatatatgaatggattaattcattcatgaaggcagagccctcatgacccaatcacctcctcaaggctccactcaatactatcacactggggatatttcagcaggagttttggagaggacaaatattcatatcattgcaaagattagtgcaaaacttggctttaatggaattcagcataggcaacccccaggccagccctggggccatggacagaggcttccagctggtccacagagatcagcagtgttgtgatccaggtcttctattttaagggacatatataagacagatgcaacctgctagctatggagacacagaattcaagccgggcatgatggcttatgcctgtaatcccagcactttgggaggccgaggcaggcagatcacgaggtcaagagatcaagaccatcctggccaacatggtgaaaccccatctctactaaaaatacaaaaattagctgggtagcggcgcgcgcctgtagtcccagctacaggaggctgaggcaggagaatcgcttgaacccaggaggcagaggttgcagtgagctgagatcgtgccactgagatagtgccactgcactccagcctggagacagatcaagactgtctcaaaaaaaaaaaaatgaaagaaagaaagaaagaaaaaagaaagaaagaaagaaagaaagaaagaaagaaagaaagaaagaaagaaagaaagaaagaaagaaagaaaaagaaagaaagaaaagaaacacagatttcagcaaaaatgtgtgggttcaactagatagacaggggataggagaatcagttctggcttcattcagggctgaaattaagttgccagttctgactcccttatcaagtccctcattgtcacaatatgcttggagttgcctccacctctgcagggcctggttcacttctcataggaagggcacgtgttcagaagcccagacacaaatatcactggtcccattgagtcaagcaaccatgacatggaagtaatcgctctgccttggagagaatagaccaggtgactggctgcagcctgtgcttcatctatggggtggggtcaggctgagggagaaggacaaatccattgaaaccacatggacaaactgagagcaaaagatggggagttcttcaagggaaactaagatgggcttgctaacagacaagaaaatgcagcccaggtatcccaaaaccccaatgtccctgaaggcacaaggaaactctcatcctctctctcaagcacaaatatgaaaacgttttttctttagaaggccagagggtaggccgggtgaggtgactcacacctgtaatcccagcactttgggaggcctaggcgggcagatcacttgaggtcaggagttccagaccagcctggtgaaaatggtgaaaccccatctctactaaaaatacaaaaattagcaggcatggtagcatgtgcctgtagtcccagctactcaggaggctgaggcacaagaattgtttgaacccaggaagtggaggttgcaatgagtggagttcacaccaccacactccagcctgggtgacagtgatactctgtctcaaaaaaaaaaagaagaccaaagagtaaacattagaggctttgcgggccataaggtctctgttgcaactgctcgagtctgacattacagtgtaaaatcagccagacaacatgtaaacaaatgagtgtggctgtctttcaacaaaaccttattttagggacactgaaatttgaattatatatcattttcacctgttagaaaatactactgttttttcaaccatttaaaaatgtattaggttggtgaaaaagtaattgcagtttttgcacggaaagtaaaagattggcaattacttttgcaccatcctaatagaaaacatccttagcacacaggccacacaggcaggctgggtttggctcacaggcagtgatttgctgatccttgttcctgaacaaggattctcaggaggtgggaggcaaggattagggcttctctcactgtcaaaagggcacacagtccaagcggaattgtgcatctagggaacacggataagaaagagcttgaagggccgagtgtggtggctcacagctgtaatcccagcactttgggaggccaaggcggggggtcacttgaggtcaggagtttgagaccagcctggccaacatgatgaaattccatctctactgaaaatagtaaaattagccaggcaaggtgatgcacgcctataatcccagctactcgggaggctgaggcaggagaatcactggaaccagggaggtggaggttgcagtgacctgagatcatgccactgcactccagcctgggcaacagagcaagacttcatctcaaaataataataataataacaataataataataataataataataaatttttaaaaggcttgaagagatcatcggaacaaattgaaattcttagtttggttagcaatttacctatgtcctcttctgtactaatttacagagagaagtctattaatcattctggatgcagaaaggaaaccgcattctcagcataaacataaattatcagcctaaaactcaaattccttcagagggatgaggcacattgaaagtttcaaatagctcaaatagaacaaatggataagaagagataatgcatcttttgaaatacaaacctgaaaagatgttatgctcaattacactgacaaaagatttgggatccagcaatatcctctgtggaattctgcagctaaacaggaatgctaaatcacaaactccaacttaagcaagaataatatagcctaagccacattacacgcgcatccgttgggaggttgaatctgctctgatgtttacaaagtgcctctcttcgtccctataagaaagtgggcttgcctgctaagacccatgcatcaccaagcagccaggcttccaaattgcccatctgggtgtcttggaaagaaagcaaggttaacagaggtcaagagagttcatgatgaggcctggggtgtgaaggggcgggatctggaccctttggagggaggagcctccattctaagaagccaatgacagggaaagaagacacgggggaagatgaagacaaaagggagtttgagtgtggttgggggtccacagtgccacttaggcacaggcaaggagaaccatgacactgaactcaggccactccagccccagcatggccccagctcctcgagctggtacagattgtcccatcccttggaagtctctagttggccttcctcagccagtctcgacttcccaaaggggaaggctttgtctcatctgcttcattgcatcccacagcacagctggcacacagtagctacccaggaggtgatgtcctaagaagggcatgtgtgttgggacatcagaggaacagaaaagagatgccaggacctgcaaaacaagagctaccactgtcacattttccagaaggcaggctgagattctacatgaattaccagttagtgtcacaacacgtgttgaagggctgactcttggagtttgtaccctgggtgtcctgggagggagacagatgggttaaaagaaaagaagagaaaaaagagattctgaagaaatggaggggtggttcttctctgtgcagcttcaaagcgcaaatccaggccctacagatgtgtgctggaggaagatggtttgagctgcacatacggtaaggagtaacaagctcggcaatgccagcagctgccttatggaggatggagcttcccgccactggagctggttgtgcagtggtaggaaaatcagccccaagagtgagtgcaacctgcaagtaggtaaaagtaaggacgtaagttgtgtgaccacatcttgtgatttctggtgtgtccagctcaccataagacctgaactgagaaacagacccaggaggtagagagagctgtgtttagtagttacggctgcttacgctggactggaggacatagcttgaccacctaccaatattgggcttcccaattctcccccagctccatgcctagagtgcggtccctcatgtcaggaatctgggtgtccagggcagatgtctacacagccaggggcagagcatggtgtgctgtctgatactccatggagcacagatctaggaactccagatgtgggtcccccctgcttcaggaggcaggctgggccatgcctggtgtgccttcacgaggctgcaggagaggagaggtatccaggcttcaggggagtccctccccaccccataagagagactaagtaacgtggtcaaagaaaggatggaagccaccttccccacaccgagcactagagtctcccagaaaaggaagggacatttaccctccttgcaacaagagctttgcagggatgaatggaatccagacccattcctcaagggaggccatggtccttgaagtttccctagaaggcaccgaggacgcatgacaagcagctctttagccatctgctggggaaataccagagtaaattaaaacaagagtggatttgtgacttctgtcttttccaaaaagatagtgttggcaggtttatgagaaaaccattcccaaacaccttgaatttatatggcacgcttatttcaaaagctcttccacatctgttagctctttgaagcccctggaggcaggtagggcaggaaggagaactgggtggaggaacagaatcacagaggggctgggcaccttgccaaagaactctcggctccctggggagaggtgggggtggcaccctgcaccctgacccctcatacatgttcaggggctgctccttcttgcctggagagctctggccaagggcattatgtaataaggctggaagcaaagcgaccacttcagagcagggcagtcaagtacaaggagggcccgggagcacccctttctcatacacaaacacagccctgcacccatgtgccctgcaaattagccaaggtttacaggtaaaggaataatggctcctcaaacagaaacaaacagaggctgattgacaaggaggcccctcataatcagtgctacagtaaactctactaattatggtgtcaattggtaacattataaaggttgaagctacataatgaaaaaagagcgtacacacaggcagagtgagttcagcagatgtaattacagggtgacattattggcaaatagtattttatgaggtattagcaggaatgtggcatgaacacattccaaaacttaacaggctcctcagaagtgtaggaacccagaactggccagagacccagcccccaaaactgtagtttgtccagctgagcattttaggggagcccctgaggtcttcttgccatcttcaaaaggagaagacgcttacaggtgaatccctatcctacccttgacatctaattccttacatgctacatcatctccctgttccttgatggtcctgagctctttcatcctcatatcataagatcttggactattcaagccagagggcaccatagatgtcatttaccttgacagttactctacggtgagcatgggggaggaacagaagcctacctgttcattctaacaatatttactggtgcccaatagtattcatggaattctgtgccaggctcctgttctagatatgcaggctatggcccttgctgtcatggtgttcacattctgtgggagattgaagaaaaacacacaagatgctatcaggtgctatgaggaaaactgaatagagtgatgtgatacaggtggctagaagaggatgggcagattgaatgggaggtccaggagactgctttctgagctgagacctacaggaggagaggaaacatgccttttgaaggacacccagctcccaagcagcagagcaagggcagaacacaggtgtcctcacatgcagcccagggtctttctattgcatcaagcatccccaaccactacttgagccggaagagaagagacattaccaactctaaggatatgggggcggccattgcattgcgaaggctaaaggaacattaaagatcaggtggttcaaaatccctaatatgcaaaagaatcacctgtgttatgtgtcatgaaggagctgcctccaaggtctggttgtctgtttctatatagcataccatcacaagcttatatcacctttcccatttctatgaagtgctagacagttctcgttcatggtcgcctgtgtggactacagtcagatggtggctggggctggagccatcccaggtttcttcacgcatgtgacttgtgtctgggctggaatgactggaggagctaggaactggtcaggcttctttgcctatggcctcttccttcacaactaggttgggcttcctcacatcatggcagtctcagaccatgaaaacttgaaaacttcattcatggaggctgcctccacccagaaaagcatcatgaaaagcccaggcaaaagccacagggtttcccaggacttagcaatggaaggctcaggacattctttcttattttttataagtttatttattttttaaattgacacacaacatttttacatagttattgcatacaatatattgctttaaaatatgcatatattgtgatatggctaaatcaagctagttaacttatgcatcacctcacatagtcattatttttttgtcttgagaacacttcaaatctactgtcttagaaattctcaggaatacaatacgttgttattaacaatatccagtaaatctcttgaacttactcatcttatctaattgaaattttatactctttaaccaatatcacctcagttcttcccctgcacaatcccttggcaagcaccaacctactctctgcctctgagtttgacttttctagattccacatagaagggagatcatgaagtatctgtctttctgtgcttggctcgtttcacttaacataatctcctccaggttcatccatgttgttacaaatggcaggatgacaggacttccttcttttttaaggctgagtaatattccattgtatatatgttccacattttttaaatccattcatttattgatggacacttaggttgatcccctctcttgtctattgtgaatattcctataatgaacatgggaatgcagacacctcttcagcatatttatttcatctcctttagctagatattcagtagttgggttgccagatcatttagtaggcctatttttaattttttgaggaacattcacactgttttccataatggctgtacaatttacattcctaccaacagtgtacaaagatttcctttattccacatctccaacatagttattgtttgtctttttgataatagccatcctaacaggtatgaggtgatatctcttcatggtttcaatttgcatttctttgatgattagtgatttttgagcattttttaatatgcttattggctgtttatatgtcttcttctgagaaatgtcaattcaggttctttgcctattttttaatcggattatttgttttatactatcgagttgtttgggtttttcatatattttggatattaacccagcatcagttgtatggcttgcaaatatattgtccaattctgtaggtagtttcttcattctattgattgtttccttggccgtgcagaaactttttagtttgatgtaatcccatttgtgtatttttggttttgttgtccagaatatcctttctgccacaatgtattgatccagcaaataagtaagcccatcctagattcagaagaagggaaattagactccaccattgagtgggaagagtagcaaacaatttgcagccatctttaatctaccacactcctctagtgtagaaacattgcctctaccaaaggcctgcttagtctcttgacaacctaataaacatatgccattcacattcagattgtctttcttttcctcaaaacaatcaaagaattagcccatgtttattgggggcttatcgtgtaaaaatacttcatgctttgtccaccatataccatataccatacacaacacacagtgtgccgagccttccctctaggagtgtgcattcaagataaggtgtcacattattccattcgtaatagcttaattaactgttagagtgagatttgacatgcagcctcggtacataaaacaggccaaggtaggacaatttgggctacagtgggagctccagaacgcctctgctgaatcccagctcagagtcacagtgtgcatgacatcacagtggatgaagaaagaaaataaagggcaatgaaatatttcttctccctagaagcagctttcttgataaaaatatatgaaccttggctgggtgtggtggctcacacctgtaatcccagcattttgggaggttgaggtgggtgggtcacttaaggttaggagttgagaacagcctggccaacatggtgaaagcccatttctacttaaaatacaaaaaattaaccaggcatggtggtgcacacctgtagtcccagctacttgggaggctgaagcaagagaatcgcttgaaccccagaaggtggaggctgcagtgagctgagatcgcattactggactccagcctgggtgacagagtgaggctccatctcaaaaagcaaacaaacaaaacaaacaaacaaaatatatatacatgaatctggccctatgggagagctagtagagtaataagactttttagcatattaatgagttttttattaaaaatctatgtcaatctgacttaggcaaaaaaaaaaaaaaaaaaaaaaaaagtcctaggggttagcttgtttcaggtagggctgaatccaggggctcacaagatatcctatgctatcacaagatattagtataggatatcacaagatatcctatactaattaacatgtaatatactaattaatacaggattgagtctcctcagctttcacttgtgctggcttcactcccaggggcactttctctatgtccttgcagggacaggatggccaacagcagttccaggcttacttctgctgttgtgctctttctctagatcatttccaccaaatttcgctctagttggccttacttgagcgcaatgctcagaccacataatcagagtggtcagcagatgttctaccctgactggatgtccgggtagtcaaatgtaccctggagccccaggtgagctggtgaggtcacttgtattgagaatgaagggcaactggctccccaaatggactaggttctcttgcaaaaacaaacaaaaaggtagcctggaagctggggaggcaaaaacactcacacagaaaggaaagtacagcaaagaattgagagacaggaggacaagagaccaggtctggaagcggggggcaatgcctggtttcttcccacaaggtaacaggcgtgcccagctgtctaggtcttgactgccaatcaatgaacttctcttaaaagtggtactggggccgagcacagtggctcatgcctgtaattccagtactttgggaggccaagatgggcggatcacttgagctcaggaattcgagaccagcctagccaacatgatgaaaccccatccttacaaaaaatacaaaaaaaaaaaaaaagcctggtgtggtggcatgcacctgtagtctcagctacttgggaggctgaggtgggaggatcactttagcccaggaggcagaggttgcagtgagctgagatcaagtcaccacacttcagcctaagctacaaagtgagaccctgtctcaccgaaaaaaaaaaggggagtccctgcatccctgggaggaggctcaaagtcagaggttagcccttgtcctgtaccccgtcaccagctctgccttcggcgctgggcctatcaccggttctccagcaccaagatgtcctctgagcttggagagcacccagacatgtcccaaagagcttttcagtgggtgctttggcttgaaagaaagccagggaaagagaaacacaactgccacgtggcattctgaaacattgccattaagtttaatgccttcctaacaaagaataccacatttattatcacaaataaatccacagatttaacacccatcaggctttagattttatttttccatataaaataaatatggccagagtataagattatgatggcaccattattttctaaaactatttaatttaagcacagcccaactgccccatgctggacacaggaagggaccaccccactcctggaagaacactggtcccactgactgcaaaagccaacaaggtaggtttccccatgcaactgctgggtttcatcactgtttaatgaattgttgcactctttataggataaacaataaattgcacatgatttatcatattactcaataaatcatgggacaaatcattaggcagagtgataaaatcaagtgttttagaaataagttaatctatgatgccaatgtgtaaactaaacagttgcttaaaaaccctatttactaatcatttttacataaagaaagattaatgattatgtagattaaatgtgtatttactcctataaacatcagacagccatgtgccccgctggccttttctttttagcaaaggccccccagaagcattcctctcgtaacaaaatttcatttggaatttggcacgatggggaagggagggtggagaagcctgggaaggaggaagaagtggttaatgagaagcatgtcagcggaggggtctggtgcagaggctgttctcaccgtaaattttgaactacactaattaacacttacattagggcttggagacaggttccaatgctgcttgcttctcccatctgcccgtgacctagcgctctatctcacttgtgacaactatgtttatagcttctctgcccatcgagctggctggcacttcgaattaccctcaagagtccatgggcatcacgtcacatttgcgtgcccaatatcatacgtgacgagtcgtgccaccgccagggcctttaatgcacatcccacagacggccagcccctggaatgcataggcagatattaagctaaatctttttggagtcaagcttgtttcacgtcagttacacaaacatattggttcccttaaaagaacaaatgctttgtgagtaaggaaacgactccaggatggaaacttgagaaatcgttctcagtgtcaattcagcccttccttctgaaggccttttatcttagggggatgagggcagagactgtttggcttctagaatatgagttttggactaaatttattataaactggatattattaagcaatgtcaagggagaggaagggtgtgccccagctagtgtagcagggaagatgatcagaatatcagagaaggtgtttttctctcttgccactaaaatattttcattttgaaaatgcctaattgcatatgattcctctgactttgaattcctctagcacaacaaatcggactctggagctgatccaaacaatgcacagggaagtaaaggcacttcgatgtgttcttacacattctcttttgcatgaagtcatgctagattgcttgagaaagtgctaatcaccaaggtttgggaactcccattcttggtgcccagcaaaacagttgttgagaggttgagtaaaggatgggagaagagagagactccaaggactgcactgtgttatcatttttctgacaagctctaaaaaatgaaatggataaattttactgacaacttcagcttcaatgaactacctggaaaatattgcctccaaggcagaaatccaagacatgagcttttacacgtggtccttagcccttcccaagaggcagaacatgaggggttatgggaggaacacaacaggagttccagctccttgtacatggccttcccctgagaagccactagctgcagagtggagtacagctctcagacatggagaaactgaacccaactaccaagataaaacaagaaaaaggtgcaaagcaggtagtatttctaatgcccagaaaagaatacaccaagtgacagccacactgcgtcctcttttcccttctccttatccaacccacctcaaaatctaccctgagtcacatttcaaataccacctgtatcagtcaaggggaggttgagtttttcttcagtaacataaaagatcaaaatctcagtagcttaaagtgaaattttatttcttgcagctgcagcgtcaccatgggcccagggaactggctaggacaattgtcctccctgtggtagcctagcaattggtttaatgttaacttcatagcattatggaatttcctagcaactgaagaaaagagcattcagaagcaggtgcttcaatgctttcaccagaacggacgcaccattttatttgccagaatgaaccatgtggccaagcctaacttcaacaatgggaaatataactctccattaaccagaagtagagaagaaccagatcttgagaaatattcatcagactgatcacacagcccacttcccagaacccctttctctgcagccacatcattccctgcaaaatctgaaaagcaaagctttttatttgtagggctcatttcccaatatcttgctgttacaatggggaccgctttcatccttaaaacagtggtttatatttctgtcagggacagtgagaagcaaatgtgtgtagtgcattttgcaaagaagcaatacagtggccaagaatgtgaattctggagccagactgcctacccttgaaccccagctctgccacttactgcctctgtgatcttgggcaagttattcacttctctacacctcagtttgctaatctgctacatgggactagtgatggtgcctaactaataggattattgcgaggattaattatgctaatactcactacagtcttataaagatgcctggcactgagtgagggctatatacgcgttttctgtgactataatgcttcactgtcaagaaagagcactctaaaaagtgctccactggcctgattggtcattataactaatctgagagaccatctcactccctgcgtccttcatcctctcccccatcccagacagaggccagaaggatgttgtgcttaaaggctgaggaagtcctttggaaatgaaatttgggtgagcggtggtggtagtggattatttgctctgcaagtgaaaatgggaggattttgaaagaatgtggcagaaacagtcatgcctgccaaagagtccatatgtcccctacattccctagccttcttgtagttaaaggggccttatggctagccatagccagtgagctaggggcagaagtaacatagccacattctgggcacaagatctgcttgctaatgcaaggtcctccagaattctgctgtcccatcacaatcactgttatgtcatcacattgtgaaggcaacacctggattgctgtattacactggaggatgctcgtggaattgcatgtgtgaaaacttttgctgagttaaccctggatattttacagtggttcgctgtgatggcatatcctagcctaaactgactaatacaaggggtttggctcctaaaagtaacagcaaagaacagagaagatggtcaagctacagtttggagtgtctgaacatttcttaagaccaagagtagttcgtgacaatcttaaggcattttgcattgctacggtgtatatgccttctatctctccttttctgtttttgttttactgtgtttattgtttattttgtaagtgtttgcacaggtagagcaactaaagaaaaagactgcgctctatatttaggctgacaccaggacaacgataaagaaagagctacaagtcaaagcctgagctttgcagcagaaagttagagctagacataattaagataacatcacaatacaccctctctagatatcttagaggggaccttaaactttccacaggatatacagcaaaagattagtcagtctgattctttcttaagaggtaggctgaacttagctcacaaaagcctaagttaggatgaacagtaattaatatcatctcacatattcagatgacaaggaaacaaaaaggattcagagagactgagtaactttctgaaaatcacccagaaagaaatgtagtgaatccaggactagaactcagatgttttactcctaaggtaatatttatatgtaggccaatctccatagagtcaaatttgtcagtaatccccatgttgctaaatccagcggtcaattctcaggccttggttgtggacatacctgcagcatttgatgcaattgactattttctcttctctggagaactcctttcaattggctttcagagcacaacactcttgggtatcctcctgcaacactggctgcaacattttagtctcttttgcttaatttctttcttgttttctcaaccaccatgttgagggtgcttcagagttcagtttttgttttatgttggtggtggggagaaggtctcactctgttgcccaggctggagtgcagtggcaccatcatggctcactgcagcctcgaactgctgggctcaactcaagcgctcctcctacctcccagcttcctgagtagctgggactacaggtgtgtgccaccacgcccagttaatttttgtattttttgtagagatagacaggattttgccatgttgcccatgctggtctcgaactcctgggctcaagagatttgtctgccttggtctcccaaagtgctaggattattgacatgagccaccatgccgggcccagagttcagtttttagatgtatgttctagatattcatcttcttgataactttgtctagtttcatagttttaaatgccatctgtatactgataaacctaacaaatgtataactctcggcctctcccttgaacttcagaattgcatctccagctgctacctggcacggctacttagttgcctaatgggcatctcacagatttaacatgtccaacgctgggcatccaatcttcctctcttctccaacctactcctgcacagttttctacatttcaaccaactgcagttccaaccttcccattgctgagcccaaaaccctggagtcctccccaatgattttgtttctctttcattctgtatccagcccatgagcaaatcctcttggttcttggggggttttaaacagtacaacagctgccatcgtggtccaagccatcaccttgactcgcctgcactcttgtgttcgcctcttggttggtctccttgagtcgcctttttcaagcctttgctgaaacatcaccttcaatatgaagctttccttggccaccaaatttaaaactgatcaactcccctttctgtgacactcctaagacgctttcccccggcacccagaagcttctctcatgttacataattttcttatttattttatctagacttcatctccctcctaccagaaagtgagctccagaggagctgggagaatttgttgtgtcctagggtgtagaatcacgcatggcacaataacttttgttcaacgagtgaatattgaggactcatgtgctccgcagcctgacctgccaccctctgccctctccttctagtcatgatctggctgttgaattccttctcaccctagtttttctctccacccaggtgcttcaagctggtgtcttgaaggacaggctttgtcacttctctgccagctcccccacatcctacttcttaaacatccttcctggcttctgcagcagcagatcatagaatcgtctctgcccgttcatcagcctcaaggccctgatatacttttccattcactaagtttatgctctgcttggttggaactgggattggaaattttatggtccaggaatcccttttcctttgctgtgacatttttttcccgactgctccaacccatattgaactgatttcccccatacctaaattattttagggcatggataataacaataagcattacatacatttctccctgaatgtttgtaacaatattagagagatattattattattattttatcaacaagaaaactgaggcccagagaagttaactagttagccaagttactgtgagataatagagtaaaaattctaatgcaggttggtctaaattcaaaccttgtgcccttggccctttcatacttacggtcagaaccaaagttaaattcttagtcacttctaattatttcctggaagtgggattcaagttccctgggggctcatatataggaatggtcatacccctaatctgtctgtgacctctttggagcctggtttagaggagtctttctggcagattcatcaggttcggtggcctttggtgggaaaggaagaaaatgggacaactttatgaatcattatacaagaaagaacatcccaatagaaaactgccctgcacggaaactagaaaaccctactccctttccctcctgcttcactactgcatcttggtgaaaaccacaatggcacatgcatgcttattacgatgggaaagaaagagatagataggtgtgtttttatattttccaaccaaatgatttttctgctccttaagtgatattttcagagactattgttactgaggaagcagcctcctataaatctggaagcagctaatataaatctaaccatccgcctacctatgtattcagtcccagggaagatacgaagtctcttccttgtagggattacgaagaagcaggtacaagtgacaaatcaaagagcaaggtaagtgactatattcatgcactgtgcttctagtttgtaaggcatgttctcatacattttatgggcactgtactaatgaagagctttgaacaagttcatagactaagtacgtagatgattcagggttcaaacccagttttcagactccaagtccaatgctgttggcaccaatacacactggaaggttccatcctgatgctcacataagtaatacactcagacaatagatgagatctgctcttatctccttattaattaccttgtgaaggtcaaaacttaactactagcttctttgtgctgttatttagactccccggggactgccaccttgccttgagtctccaacatggctggcatccctggacggtagaaattacatcttgcacatcatttatttccaaaggatgtccagcaatgctctggaggcacagcaatgctcagaggccagcaacaatctcccttggccatgcaatattccccagctgttctcatccacatagaactggctcatcttcaaatcaggtatgcagtaggtgctcaaaaaacacatgatagttgagaaaatatggagcaaatgcaatcgtgggctgcaggatacctatacccacccccttgacaatatcattcctcctcttgaatttgggacgtgggtcagtcctgggaacaagagatggcttgagcatgtttggatccatgtcttccagcagccatgggaatcaactgcagaccctttgaacatgacatgccactcaatttttttggtgtgatggaaaatcccacacccccataatggccctgtctccaacccttccaccctcaggttgtctctcaatccttgatgtcaactgccaacctctcagaccaaggcttgggactttgccatatgggatgcctttgattacagtgggggtcactatgaacaaggattgcagagttgttcagaggagattaaaaacctgccccatcaggcagccagtgcatgcccaagccaagaagaaagctaagaatctccactcccactttatgatctaaccactagactgagctcctgttacttgacaaaaatgatttgcttttaattaaaataggagcataagctatttttatccctatattattgggcggtaagtaaattcacagtaactcactggattttttaaaatctattttaaatataaacacactgccatattttctgtgggtttgaaagcttatgttaagtttgcaaataagtcaactccataaagataacatctttccctaaaaaatgtgttgcaatctaatggcatgctatggaaaattaacatcttattaagaaaatacatgaattctccctccgttgaaaaggtccaaatagcgctgagtttcttacctgcccgtgagacaagatggactgatggggtggcctccaagcctccaaacccaggcaccccccaccccaggagtgtcctctgccaccctcacgggactcacatgtaacaaaaagctgtgattttattttgggtcatgctgaactctgtttttgaacttatcctgttacatgtctgacaggtcctgtattcacggagggacctgcattactctggttcaccctgaaaagatgccatctcagacaggctgcatgggaaggtgcagtgatctcccagcccagctgcctgtctgaacaccagggatccaggtgaatccccataaggataaggacattaatagccagatctcacatggccgtaacaattagagctcagtgatggggacagagccctggacttctaacccattacaaggaacgtaaaaacccaaggccacaaagggctaggtatcatctttagatgcgatgagagctcactgtgcactgctccccaagtgaattcccttctggtcctgccttctatgtatcttcttttccccactccactaaagagtgttttaggaacctagcagatggacctagagccatggctctttcttgtgcctcaatgacacatgttttcaacaccctgccctgggcctgagcctttgaggggttccaccgatgccccgtccaaacctgcattcaccttgcttcccctttccctcctctgaccactggttctcagaaatcttaccaaaatcaaaggacttatgtaaatatgaaaagggaaaagctgtcaaaacctgcatgagttgtttaaataccatgaataagaaccagtaacaataggcacatcaatgaagatgtgcttccttcagacttggccaggtgccacccaacgcgagtcccccagaaaacgctgctcactcggcaagcaagggagcttggctcacccgccccttcccggcgccccctccccaggaaaacatttttgacaagcaactcatctagagccatttcccacagctttcctttcatttgcattctcattagaataatgtgatttcgcagagtgggaatgtgtgtaagtcttcaccaccaggaggaaacgctaaaacccagattccaggggacaggggaagatctgcccgtggggacacagggcagccaggaggagccccgccagggcttggcatgtggcaccagccagggtcagtgaacgcccacagtgacatcacagccaaacaaccgggaccttatgaaaacctcgaattgacccaaaccggaaaggaggtttcgaaatggaagaaacacatcccccacgttttgaaaaataggccctggcatcaaaaaagagtaaaacaaagtgttttcacagagaatgggaaaagcatgccttttgctttctcctactgctttgttttcttgaagatgcttgcccctaatttaaaattgccacatgccaacttttaaaagtgctataatggaatcagtttctctaagtcattccagggcatgacttatagaataatgtttttagtgtacccactgtgtgtgtgtatgtgtgtgtgtgtgtgtgtgtgtggtgtgtttgtgttttaaaaggacatttactgagtgatatcttgtaaatattttttggtcatttaaaagcaagaaacaaacaatacaaacatcctaagttctttcccacatcctaagctgatttccattctactttgggaggtcgggtttcttttatgtcctgaaaaattggaaaagcttatgaagccaaaaaactttgcaaagcaaattttccagtatttgcttagctgggtcttcaagcaaggaaagaaaccgtattcggtgtaaagatacataataaatgtctcagaacaatttcaggacagaagaggagttgagagtgggggattgaaaacggagctggaagtaggaaaatggggcaaaatattgagtttcaaatgactgtaaaatgagttcaactccagaggagttccttctggagcacgttttccagccagtccttgtaaactagatctccctgcattagcaagtcttaaggagcgaagaaaaaaagtgaattaataaaatgttcctgtgcaacattgtcctaccctgctcagagatgctttctgggcttccttggggcaaactgggatcacgttcagcattccaagtctaaagaaacagaaagggaatgtgttccacctgccgactgacacctctgtcctaggtcacctgccctgaagatgctaaatgcttttccaacgtggtgtaatttgagtttttttatttttttttaagattctatgagcatatcacatttcataaacataagaatgacatttcaattttttcatataaatggcaaatttgcagaatgagagaaaaaaaacaagactctagaaaccattttttgcacactcaaagaatgtgagcacagcccccttctggcaaggacatctgtcactcacacagacgcaaccctcttgaagccaatgtaaacagctccttactctccctgcctggctcttgggtggaggcgcagaaccttcggcggtgtggatggagcttcctttgaaaagtgcatttgcgttttggatagcttggcgaaaagcacagagctgttttctggggtgccaaactgtttctattttcccattaaaaggaaggaaggaatatatatattcctaagtggaagtgcattcactacatacgcagacggttacaaaatttgggcgaaattaatacaaggcaataaaaatcatttagcatatagataagtcaatttatcatagactttctactagaagaaacatgagcgttctcggccatgaccctgacaaatgtctctgggcccagttctttaagcgtagtcatcgggcgggctccgagtccctgtctcgggctctgtgagtgtctaataaagcgtgggtgtcaggagctttgtcagtgcagtctctgcctgtttggttcatctcgtctcctgaataaagccctgcagtggcagtgcaccgcgactgagatagcttggctgacactattgatttccatccacagtacactttgtcaaaaatcaaatagaaggccctttggaccctttcacctttaccaaacacaccacaaataaacctttttatataaagcaggagaagggccgctctgtgggaacattgtctccttgggtaaatgttaccgggagccctcactccagtactccagcacaaacttaatcacaagccgagttgagcaaggagtaataaataatctggtcaaggtactggaagagagaggggctagatcggagccagagactgggcaagattgagagggaaaaagacagagggagggaacgagagaaagaagcaaacattttaaattttgttctgtgaatcttttttcccactttatttttttttacatttaaattaaattcaaatatagtctttttaaaattgtaattagattcttttttcttttttttttttttaaggaattctttccccagcatccactaagtaaacattatagcaaatacattactggtcagatgtatgcattaagtatgccataaacctttctactggccaccgactctgctcccgctccctctctctcctgacacagagaaaatattatgcagtgactcgtttctagtgaatccgtgtgattcattgcccaattttaaactgccaagctgctaaattgcatcaggtctgccaaaattcattccaggactacgaggagatatgaaaaattaaatgtcatcttggtacagtggaaaacttttacctttcagagaacagaatatgctacattctgtaatgatggatgattgcccgtggctatacttaacctacttagtaatgtcatgtagtggaaagcatgtttacctaaaaaaatggcagaagacataaactgtatcaaggtctgacatcaacgcattttcctccaaataaagtgactttttatgttgattctccgatataaaataattttttctcatcagcatttgcggctagtactctgtgttgcgagggtaaggaccgaggcacctcggccattctctctctccgttctcggaggcacaatgcctttgtgctacctgactcaaaaacgctgctatctgttccggccacagcttaatcacataagtccctaagaagggagaagccgagataaaaatatttgaactgttgaagaaatacggactcacggaacctacaactgagtacaggaagaaacattttgcataacgactccagcctgcctggtaatttttctcttgagcctagcgtttttctgacagcttcatttgtttaacacacaactaccggcactcttagttctagattatgataccggtcttcggtgcattattatatcttcgctaaaggaggaaatttgggaatacctggactctgatgtctctaaaatgtatggccactgagggtttgctccgattcctattatggcctcatcttgcaggcacatgcaagatgttcgcctaagaactctcagctcagcgaatcccggctccttcctcagtgccgaacgcaagggctgtgatatttattattatgaataccatttgtattaatcattacgataaatgactggtttggctatctgaatgcctcatttagagaaacttctctcctatgtcattgttataaattactgccaaagctctgtttcacccaaggcggcttcattcactctttcatatttttctgtccaagagacgttgttacccatcctccaagcaataggctgggagggcaattgttatcattgcaaagatgtccacatacatggcaacagagagttgtggattgttgtgggtgatattttttccccttttaggtgaacaagaggtattcttttcacatctatatttgattaaattattcagtgctacaaactgcaatcatgctttattaaaaattattacaaattcatgcaaggactacagatgtgaaagaatttattgcctgcttgtttttctaatttgcatcattgattttgcagggaagagttttaaaaacaatctttattacatagattttaaggggaaatcacagagtaatgtctcgtaagatttatgatgtactgcgtgttgattttatttacatttttttttatttctttgcttttgaagaaaggttgaaagataaaattaggtttgcacttgtaaacaatgaggcacaaagataaaaagaaatgtttttctaataaagcaagcccacagacatgaagtgcagaacgtaaggtcagaaaacagttaccagcttttgagtcaataagataaaagggataatgaattatactgtaaacacctaaaacacagcacatctttttatgttgttaaatccatcttctcaattcaagaatgttatttgaacaattcatcatttatagagagcgccagctatggctcccacatagcatgttccaacatgctgcggtggcactggtcagaaacccctcatttataacaacccccgccataatcaaaagtaaacccagaagatttgatgcaagtcaaatggggcagaaagtgactggttaggccctcctagactaaataattcactaggcactagagagagactaaaccaatgcatgcatgtctcctaaagaaatgaatgtcacattatattataaccaatttataaacatgaaatatgcatgtttaatttgcacttaaaagtttaatttaatgtagaagacattacttattctcttctttgttcaccctggctaacccatgaatgattaaagagaagttagaggactcctgtttccttttttttttttttcccaaagaccatctccacagtttcccaactctgcttcccattgaattctgagcaatgactggctactttagcaattaaaatccaggggcaaagacacagcagcttcgttgggctgagagactccgccattcatcatctcggctgccataaaatagcactagatggaatctttgattttagctttagaagatcataaatcaaaatctaaagcacggctgtcagaggcatcaccaggattatccattggagaggggctggagtgcagggcacacacaggcattgttcccactgaactcacctcctgatgcatagagaaaactcctagccaagcacttgctggtgtataagtactttatcctaagtgacccataaaaagactctcaaatacaaggtttgataactacagtcacagtaattgtacgcttgatatgtctgaatataaaataaataggcccgcctggctgggacccaccctgcccagtcccctgccctgatcgcctggtcagctcccttacccatgagctggctgagtcctggataagggtgtctgttggcgagagaggcctccaagtaggtgcccccacctgcctccccgacagtgagatgactgcaatgcagggatgatgaccatgatgggagagatgcagctagagggaatccatccccagaggaaagaagtcagccttgcacttatcagccccaagttcatggctcatgttcaattgaaagtaatgagtattgatatgccctgtgctactgaacgaattagagaggagagaagctcaggatgaccctctcaatacaaagaaagatctcccctgaaatctcactttaagggaagaacccacatgtgcccacccagttttcgcaaaccatgttattatacttcttggagcaggactcgttcctttactgcaaacagaatggcgtggcctttgaatccagattatgccatcccagcagtgggtggtcaaaagggaaaggttttgttcttgtgaatcagaaggaagcaggccaacattttctccccctctgttgtttctgaagcttttaggccactggctcagaatatcgtctagcaataacacgtccaatagcaaaggaaaagcagccgtgacccgtggccgagagcatgcatttcagacaggtgtccggctaattaaaagaaaccccggcccaatttagagaaccccaagatctctgaattccactgtgggttgctgcatgctcagaccctccgatccctgcaaccaggcctgctctcaagccatgtctcagacattggtggttccaaggcagctcagtgccggtttgccttagatgagcttgaatcagttttcgacaaacagctggtatgacggatggtgatacccggaagataaacagcatgccgtgctttataagaatcttgactgctaatttgaagtggaagaaagaggtgccataatgagccagcttctcttgtctaaacgtgggtattgaacctggctgccttggagttgtgtgtattcacttggtatggacattgaccaaaccaggagtcggcgttccagagtgggcgccaggtcttgcctgaatgtgctgtctgcctttcaaaggaaccaggtggtagccacgtggtatggcttctagacctggttctgagacttggctgcaaaatacaattcccaggaggcactttgtcaaaatgttcatgcctgagcaaagtcactagagattctggtttaattggcttggggtgaaacgtggacatgggagttcttagaaagctcttctggtgattctaatgcagaggcagggttgaaaatctctgtgctagactagtgggtcttgaacattttggtctcggaacccttcagaatgtagaaattctgaaagttttaaggaccctaagtgcttttgtttaggtgtgccattagaaattaaaactaagaaaattctaaaatctacatgcagtcatgtatttaaaaatgaaaataaacctattatatactaacatatctagaatgttttcatggaaaaaataacagtatgttcaaaaagttagtgacaagtatggtgtcttagtagctctttgcaaaccactggcttaatacagaagtcactatatgaaaaaggcatgtacacgcccatatttatagcagcacaatttgcaattgcaaaaacatggaaccaacctcagtgcccatcaaccaataagtagataaagaaaatgtgtatatacactgtggaatactgctcagccataaaaaggacaaaataatatcttttgcagaaacctggatggagctggagaccatcattctaagtgaggtaactcaggaatggaaaaccaaatatcatacgttctaacttataagtgaaagctaagctatgaggatgtaaaagcataagagtgatataatgaactttgggtatttaggtagggggaagtctgggagggggatgagggataaaagactatacattgggtacactgtacactgcttgggtgactggtacaccaaaatctctaaagaactcattcatgcaaccaaaaactacctgtaccccaaaaactattgaaatgaaaacaaaaattgtttttaagaaaagacggctagattctaatatctgcttccacattcagtcttgcaatatgttgtttctgttcaaatctatgaagaaaacctgacctcacacagatgtcattggaaaagggaggtatatagtaaaagccctttcagataattgtggatgttctttgatactacaccaaaactcagcaactggtagtttctcaaaggttagttgcaatgtgaaatctgaaaatatataaactttttgtgctccattacattaaaatccactggtctatcttgatatttgaatggatttttttaccattacatgattttattacatctagcacaggtcacttgagaaatattagctcaatgagtcatgtatgcagatcctgcagtgttgacacatccattattcaatattaaagaaatcacatgtgttagtatctctttaactattggaaagctatcaagctcacggtggctgatacaagtttttcaaaattcttgaaagcttgagtttcatcattggcaacaaatactgtcacttattttcttggaagtgacagaattaatttgttcattttccagataatgtctgccaaatagtcaagtttgaataaccatagtttgtctatcagttgttctttcaagtaaaaatggtgctctctgaaaaaaaaaaaaagggcagggaattcagctcacagttcagaagattggcaaaggtgcttttccttgaggcagctgtggaacttccagatggggcagaggtgctctatgtctacctcccacttcatcacaaagaacattgaaaggccagtgctcaaatattgagatttaataaaatgaataactttcaatatgtcatcaagtacattcttgttatttcaaattcataatctctatactttactcgttttcttattgtggtaaaatacatgtaatataaaattttccatcttaattattttatattttatttttttgagatggagtttcactttcattgcctaagctggagtgcaatggtgcagtctcagctcgctgcaacctatgcctcctgggttcaagtgattctcgtgcctcagccttccaagtagctgggattacatgcacctgccaccatgcttggctaacttttgtatttttagtataggtagggtttcaacatgttagccaggctggtcttgaacttctggcctcaggtaatctgcccccctcggcctcccaaaatgctgggagtacaggcatgatccaccgcatctggccccaacttagctatttttaagcctacagtgcaattgcattaagtagatcacgttgctgtgcagccatcaccatcatccatctccagaactgttttcatcttgcaaaaccaaaactctgcattcattaaacaataactatctgttcccctctccccccagcccttggcaaccaccactccactttctgtctctatgaatttgactactctgagtacctcatataagtggaatcatacggtaattgtctttttgtgactggcttatgtcctttagcataatgtcctcaaggttcatccatgatgtagcctgtggcaggattttcttccttttttaaagctgaataatatcccattgtatgcatacactacatcaagtacattcttaagtgaaactggcttttgttttttctgcacatgcatggcagtaaagaatacagtgatgactagtacaggtctgtgctgaggagacaacagttctacccaccctgagtacaaaatggaaaggcaaaccatgtcatattatcacaaaaatagcgttggcttttcagacaccggaaaccatctcagcaaatttacaacctaggttctatgttgcaatttctacttacacagtggattagtccatttccacctgcttataaagacatacccaagactgggtaatttataaagaaaaagaagtttaaaaaaaaaaaaaagaggtttaatggactcacagttccaggtggctggggaggccgcacaatcatgatggaaggtaaaaggcatgtcttacatggcagcagacaagagagagtgaggaccaagtgaaaagggtttccccacataaaaccatcagatctcatgagacttattcactaccatgagaatagtatgggagaaaccacccccaggattcaattgtcttcctctgggtccctcccacaacacgtgggaatgggagctacaattcaagatgagatttgggtggggacacagacaaaccatttcacacagtaaagtagaaagtcttcaaaaaagaaagagaaaacagaaaatgcactcatagtcctaaagcccagaggcagccaccatcagtatatgcgctggtatgttttcttatcaaggccacattcctgaaatgttttgtctttatgatgctgataagcagggaaagggccaaaagacactgtactggacagatattttcattctctctacaagctctagaaaaacagaggacaattaaattcaggactaaaccaacatttggaaatgtgaacgtaattaattccatagaaatatttagggaatatttgtctttcatttttcctccgtaacatcttgatatagggagtgtgagaatccctggctccttacctctaaggtccttgtttctaaaatgtgggtaggccatggtgcagtggctcattcctgtaatctcagcaccttgggagactgggtgggaggatagcttgagcccaggagatcgaggttgcagtaagctgggattgcaccactgcactccagcctggacaatagagcaagactctgtctctaaaaatccaaaaataaataaaatgtgggtaacggtggtctcacactggcccatgggagagggttagtgatataatctccacttagtgccgagtgagaagttggcatagaggagggagctcaccaagtgtccattgtctttcaataaatactaatataagtaacaataatagtaataataatcatagtacctctcagatacttatttgctttatcttattaggaactcacacagcaatgagattcagaggctggcccaactctgtttacttagcagatgagtaaatgaaggttagaaaccctgagagcacagaaagggcccagacacaggaggcaggactgccagtttcaccagggagaggatccctgaaatggatccctgtacctccctgtgatggttaatattgagtgtcaacttgattggatcaaaggatgcaaagtattgtccctgggtatgtctgtgagggttttgccaaaggagattagcatttgagtcagtggactgggaaaggcagactcaccctcaatctgagtgggcacaatctaaacagctgccagtgcagctagaataaagcaggcagaagaaagtggaaagactagactggctaaatcctctggcctccatctttctcccctgctggatgcttcctgcccttgaacattgggctccaggttcctcagctttgggacacagactggcatccttgctcctcagcttgcagatggcctattatgggacctcaccttggggtgaatcatgtgagtcaatactccttaataaactctcacttacatatacatctatcctattagttctgtccctctagagagctctaagacagattttggtaccaggagtggttctagaggaacacaatattaaggatagagttcttaaattggtttgggggtttctggaaaaccctgactaatgcactagggagaagttccctgaaatggatccccgcacctccccacacctccctgctggtgctgtctcactaccacactgcactagttctaccattcatttgaagttcctcctttaaaatgactcactttttttttttacttaaatagtgattgaaaggaaagttatatgactactgtaaaagtaaaacgagcattacttgccacaaagaggcagtaacaacaaatttaaatatatagctatctgaatagagggtgttctccacgtatcactgaaagtcacctggtggcctcccagaagcatgtggtcctgggctctggctctgagtggagcgtggagactctgaaaagccctaagtggatgctcagaacatctacagccatagcaccagctgagcgctattacaaaccagatacaccactcaggatgttctatcatttgtattcctgtgatctaaatacttctccgtccaaactttcagggcggtttctaaatgcacaaatatttataggtgtaaattcaagtgggtggcaggtattgtgtcaggtgggtaaggcatatagaacaggagtaactgagatgattctgccaatcccagagcttggatggagagctgacgatgagaatgcaacccagggacaaggaggagggtgctggcctttggtagcctgcaaaatggaagtctgggtggtctccctcagcacttggcaagaacggtggcccccactggctgggctccagagctgagagtctgtggatctccctgtcccatgagcccttgaaacagagagtggaataagacaagatggtgacaaaggaagtgttaacctgtgctaccctctgcacctgctcccaacagccttacaaaggaacatttaattcccacaaaaaaggaaacagatgttgtcctgttaataaaacaccaatccttaaaatcatcatcctggccaaatgctatggtcctccctaataaacatggatggctctgtgaccggctggattaattaatacccacaggttcctgaccttttcctgggcacatggacagtcagtccccccaagacagatgacccgctggctcgcctctgcctgtgatgtgtgcgtgtccttcttatgcgagagacatgggaccagaatccaagtccccgagcgagcctgctttctgttccagagtaaaataaacataaaaataaaaacaagcctgcctgtcgttgacgttcctcattgcacaacaagcgccttataagaaaatcagtatttgctgattttccaacaatgaaggaaacattgttctcttctaatgaaagggcaagatttcattttctttttttaaagcaataattcccaccccacccctccccaaggaaatggtaatcatgctctctttgtcttacctggttggggaaatagcatcacctgagtcagggtcttgactggagagtcagcaggtccatgcctctgtgaatacatcaggagcaggtggggcctccaggtggggtgtttggaggcccctattcatggacaatcaggaggatcctcaaactaagagaaggaaatacatggagtgttccggtttccatgtacccccacgcttacccttacacctacttccatatacacagggctttcaccagtcgcaggtctagcctcacggtcttgttttctaatttatactaaagtatgaacagccatcccaagcgtaatggggaatagggcagggagggcacacagatagaagtgggcacctcagtttgctgtattagatcacatccatgttccactatcacagcctgaggccacaaaagcaaaacaaaacaaaacaaagcaaaaaacccagtaatgacttgtaccgctcaggaacatcatagaaaatgaaacatgagaatacacaaaatcagctacagaaacaatgaaaaggtacatctggaacgattcgacctggggcagcataaacattgcaattgtttgtagtcaaggtagaaaataaaaacagaaaaatacatgagcgtcatcttagggaaaaaccctccccccgatcttgggtcagtgcagggaggtagtcaaagtgcaggtgggaaagcccagtgtcaaagctgatcataccatccaacagcgacttggctttgatcaactgtatttagtttttctgccttcatttctgtgatggttgattttaggtgtcagcttgatcgggttaaggaactcccagataggtgttaaaacacaacttctgggtgtacatggaagggtgtttgtggaaaagattaacatttaaattgggagaccaagtaaagaaggtcggcccttgcccatgtgggctagcattgtccaatccatagattggctttaaaaggtagatccgatggatcaaaaaggaggatgaaggtgaattctctctctttcttctggagctgggacatctcacttctgctctcagctgtcagagctccaggttctgaggccttcagactttgggactttctccagcagctgcccatattctcaggccttcagattcagattgaatcacaccacaagatttcctgggtctccagcttgcagagggcagatcatgggagttctcagcctccacaatcacgtgagccaactcccataataaatcccctcttagttttctcaaagaatgaaaaacagattaccatttgacccagcaatctcattacggggtacagacccaaaggaaaataaactgttctaccaaaaagacactgcccttgtaggttaatcacagcactgttcacaacggcaaagacatggaatcaacctaagtgcccaccaatggatgactggatgaagaaagtgtggtccatatacacctcagaatactacacagccataaaaaaaataatgtcctttgcagcagcatggatggagctggagactattatcctaggcgaactaacgcagaagcagaaaacaaaatactccatgttatcacttataactgggagataaactgggtacatcataaagatgggaacaacaagcactgagttacaaaagggggatggaaaggagggaaacaaggttgaaaaaaccacctactgggtagtacttattgggtactatgttcactacttgagcaatgggagcattagaagcccaaacctcagcatctcataaaatgtctgtgtaacgaacctgcaaatgtaacctccaaatataaaatttaaaaagtaaaataaatccctatctacctatcatctatctaatccatctgtctattatctatcattgatcatccatccatctatcatctatctgtctatcatctgtctataatctatttatctacctctatttatctatctatccatgcatttatcctattggttctgtttctctggagaatcttcatacagcttcccatctataaagtgggtggaataatagtgcatatctcataggatgttaggaggatttgtggggaaacatcttaaatggaacactatgactttttgctactctatggctatacttgggactactgtaaaataagctcttcgtaactgagaaccaaaactttcaaaacaaacatctgcctttcagggacatgttgggttgagagtccccttttcaactaccacctcctgctcagcttccctctcctgggtgggcatggtatggggcagtgctttgtgggggatcacacaaccctctctgggaagcaattgatggggactgggaggcttaggcatagctcctgcctcctctcccttctaacctgagcactcagacaagtggtttaactgagtacagctcctccttgtctgcactatctgccatctggaaggagataacaagaatatgcaaatatgtggttctaacacctgaccttctaaaccttctggcttctgggtcccagtgaggaccagtcttgacttttacgagttctcagggcaaagacatccacacaaagatagccccatcatgttcaaccaaccctgcccaaagttggagcgccccaccctttaacttactgcttatttactgctatcagtaagcttcttttgttctggctgccaggaagttcaaagaaaaattaagtgttcaactagagcaactatgtaaaccctcatgttaaatgtgtgtattacttctacatgaaagggtttttttttctttcaatacattgttgaaatattctattgactagatgatttttttcaaaggttaagaggcagagaattccccagtggggataatacaattctaaacaagcaggatataggatcacagcggtgaaacacaccagggtttggtctaagagtttctgctcaagagactgatgtttcagtgaatgcctcctactatcacctccactataagctgaaggaataacaggaagaaatgaacaagggcaggtggatcgggagtcagaacaccaaggttctagccatggcgcaccatttggtagctgtgtgaccaccctgtacctcagttatctgatctgaatctgtgaaatgggatataatgggaagaatgaggccaattctccctgggcgtctgagggtctaggattgctacaagggtgacatgaaacaaaggacgccaacatctttcgaacaggatgaggcactaagcttctctgcaacattgtcataaagatgtcatcttccacgcttcccatcataatatcagcaggtgcaccttagaaaagactcactggggaaatctgtaagcaatatcatgcaaaaatccttctccacatttctatttcctcacccatgaagcaaagaagaaaaattcctgacccgtgtccccaagttggtggtggtcaagaaatgatgacaactcatgctgctagtgcccagggatggcagctcacacatttgaccttccttgaaaatgtatgagtaactggaattctcaaccctggttttgaggccaggagtctagggcacagagaacttaagatattaccaaaaggcacatagcaattcatccacaggcagtctggtcttaaagtcaggattttcacggtacttcctctgcggtgaaagagggtgggagttctcaacaggagtgaaggcttctgagctcaaaagaacttctccaggtcagcagtgctttaagcaacccgtgttcctaatgggccctgaggaacccaagtaagacagtggcagggctcactggaaccaggtcaaggggaggtatgcacccactggtaaccaccaggatctgccgtcccccgaggtcgaaggtcagctccacctctttgcactctggtcagatgtaatggaaagacactacagacaccagcagagcccacatgagaacacggatgagtctcccagacagaaggtagagcaaaggcaacattcacagagagagcacatgagaagcggttgcccttaagtataagagcaggtgaaaccagctgcggaggcgtgagaggtttattcatgttctagtcctgaatctcggtgctagttacatgggggggctctgtttatttagctgggtccttacaatcagtgtgtttttccatatgaacataccctttcacacttcaaaataaatatctgacaaaaatgagccacaacggcctcgcgcgatggctcgtgcctgtaatctcagcactttgggaggctgaggcaggcagatcacaagctctggagttcaagaccagcctggctgatatggtgaaaccccatctctactaaaaatacaaaaattagccgcaggcggtggcacacacctgtaatcccagctactcaggtggctgaggcaggagaatctcttaaacctggcaggtggaggttgcagtgagccaagatcgtgccactgcactccagcctgggcgacagagcaagactttgtctaaaaaaaaaaaaaaaaaaaaaaaaaaatgaaatgaaatgaaataaaattaaatgagccacaacttctgggtggaagcaactatgctggcgttcagaggtgcccgctggcatttgctgggaacaccagtcagggccagatttgaatccctaaaataaataaataggtagagacaccaaatgcttccccccaccttggctttcacgggatggactcaacctgcctccttagaagatgcacagacaaatttcagaacaaagaaagcacgggtggaggctgggtgcatattttaagtatcacacagtacaagctgcctgcctcagttgaaattaaataatattcatgtgattggttgatgtccctctgtgagcatggggcagctgggccagagactggtgtgcaccatccggggacatagcaggtgctctagaaacagccaaagaaggaggaggtggataaaggaggattggcccccatggcgccggcagctcctaccctgtgcctggtgttctcccacctcactccctctctctgcctctccctctgtctctgtctgtctctctctctgacactctctgtcttcctatctctttctctgtttgtctatgtctttctgtgtttctgtctgtttttgtcattgtctctttgtttcttgtctctgtgtgtgtgtgtgtctctctatctctcactgtgtctgtctccgtgtatatggctatctctgtctctctgtctctgtctctgtgcttggctgtctctgtctctcggtctgtctgtctgtctgtctctgtctctctatctctgtttctttgtctctctgtttcattgtgtctgtctgcctgtctctctgtgtctgtctctctgtctctgtccctctttctgtctctgtttctctttttctttgtctctctgtctttctcactgtgtctgttggtctctctttctttcacatgggtgtacacccacccttacccacagcctcaggtcacagaggcactaagggattctgtccctcaggctctccaggtgtcttggccataagaaacccaggtgagtctctcagaacagccaggattcagcacacagaagacaatgcttcaagcccttgcccaaggccagacccccaagcacagcaggcatgggccttgcttcagatgacgctgaccttctgggcatccctgaagccccagggacctcagatcccactgtgcaatggggctgcagtggtcaccacgttctttatgtagagctcagacttccggctccatagccacaatcgtggccgcccatctgagcgtatctacagctctagagttcaccaacaccaggttagcaatttccccacatctcatctgaaacctacaagggctgtgcttagcaaagcaatggcagggatgtcactggcactcattgcaagggggaatctgggcatgcccacttctcctgcctcatcgtcgtacccccccatctgctttgagatctgctcctgcagctgtgaccttctgctcccttcttgcaacccctgcaaaaggcagcacttcaccatggctggagggagggctgaggaggcctcagagggtcagcccgactcccagaaacactgaggtcagtagcagcctgccccgccccagccagcagacccctctgcttcctctcccctctgcagtttgcctgttgctacctggattcctggaccctcccgcccccctcagcacccctgtgatcgggtgctccactgcaggatggccaagtttatatgctgtcaggcactttatatcccctataactctgcctcccaagccctcctgtgcatgtgtttaatttttacaatcaggaagaaggatggggagagtgacagcccagacaccttggaggggtgggctccggccctgcctcggaggaacctgcacatgaattccatcagtgaccctaggttgtattttatgcctaacaccccagtggtttttaaatctccttaaacttttgatgactgagataaaggaaaaggaggaggttgtgtaaatatggagccactattggggaagagctgccgggacctcggtagggcaggagtggaggccaccaggtatcggtaatggagccttgcttctagctcccttgctgctcacctgccatgccaacactccctccaccttccagtgggcagaacagtgggagaactcaactaccccacaccgtgatctttccgagacacaccctacctaggatgatggtgatgatgatgacgaccacaaaaagaaggaacacttttttttttattaaatgagaatgaacacatcttttaacatgctggtttttattgatcatcactcacagtctagtaaaaacagtgcccttgttatgcaaatacagctctaaaccgagtccccccagtgccacttccagctggatggcagctcaaaacccctcctgcaagatagttctgcagccacaacaccagagcaattgtctaaaacggcaaatctgcttgtatccctcccctgtgccaaacaacatctccccatcaccctcagtctatactctgtgtccaccctgcctagctccccaccttccaataaaacaacagcagtaactgtaacaggagccaatacttagtgactgattgcgtgctaggtattttacagggattatactgttttctccccataacagtccaataagggaggtacttttattttgctcatttcacaaaccacagggaggaggagaaggctgcctacggtcacactgctggccagtcctgtcctccaggaagccatcccagagggccctagggtatgggctgagtgatgtgaccaacttacactgtgcccacagcattccaggcttttctcttatcacagagatatgttgtagtttaaggtcagcttgtccatattcctccatgggagggagacagatacaccatctgagtcattcttgtgcccccaagacccagaacttggcacacgggagacatccagaaagcttttgaatgcacccatgttggacttaagccaccaggcctttattagctcaggtgggctctagggtgcctctcctggccctgtgagctgttgggctggaccccacaaccagggaggagggtccttggtgatggggattggccttcctctcccccttcctccctacttcatgaagtcttgttcatgcacaccatcaaggtgcttgttaaagcaggacatcacttggggaccctttgtatccattggattccctcgaattccttggccccaggagtaaagtttaaaactgattctgcaaaaggatagccccagttgggcttccgggtgaaacaagtgtaccagacaataaacactttattcccataagaggaggagaggccggagggcccgcaaataccagcgagcttccatgcagacccaggactccaacgaagacggcagatggacccagacagagctgaagcaggactgatagcaatcaataccatccaacttaatttaattcatttgccttgtattgaatatgatcttaatatactaggagacatcagcttctattagagcccaggaaatcatctttgaaaagaggcaaaatggtatcaaatgcataatttgaaaaacattgttttcaacatctttccacttcatttagcattttgaggaattgaggctatatcttgtaactatcaaactgaattaatcaccttgagacctgatagaagataactggaactctaatttcaggctgcttttattcttggaagatagccttttaagtgggaatatgggaattagtgcaaaatcgcttccactgtgcgtaggctgccacactacaatttttcagtagactacagcttgctattaaatatgatagtcactgactacaggtggctactgaacccctggaatgtggtgttctaaactgagacataaaatacacatggatttcaaagacttagttaaaaaactgtgaaatatctaaataatttttataataactacaagttgaaatggcaaatatttttgtatttgtgggactaaataaaatatgtgtgttcactttaattttcacaagtcatttcacctgatttttttcacttatttgttcatctcccagaaaattaaaaattctatatgtggctctcattatatttctgttagacaatgctagtctacacaatgaaatattgtggatgtgtgcccagagtttttttttctttgaaatagtgtatttcctaagaatgcatttacattaagttgtgccaatactgatgtatttgattgtgtttctttattttgattggaatagatagatttatacatagaagaatataatttggaatttggatctctaaaactgtgcccagagtttttaaatgacctgtaaaaatatataggatgtaattttacatgaaagaggcaaggaaatatgtatgtagaggataattaaaaccatgtaaaacatacggatatgtttacatatatgtagacaagaaaagacagaaaggaaattcagctagaatagacatctcagaatgggtggaatgacagttgattataatgatctcttttatgcatttctacacattcctgagagagatttttttgcatttattattaaataaaaataaacattatttttacaaaaatattttccacaaaattagtattgttatgtgtatttttctctgtcttgcttggtatttgctaaagtaaataatttacaatcacacttagattttatttaacccccagtggcatctcgtcacaaaatacaccatttttatgaagaactcattctcgtggaagtccactttttagttagatcacaaaacattttatttaaattaatgttctagtcagcaacagatgatttggtaaaaaaaaaaaaaaaaaaaaaaaaaaattggtgggtggtcactattacaatattacattggaaagagaaattttattatcaaagcttgctcatccaaaattcatttttaatgggctttttgcctgaacaaaaagagaaaaaagagatcctggaaaatatctcatggatttctaacagttagtcttttatatgggctacatttgaagaaataataagaattttctgacctagagaagcacaaatgagaaaatggttctggcctgatcttttcccaatttggttgaccctcaagaagccctgttgcaatgacctccacctggaaaacttgaactccttctgggttgcacaggcccacctgccaatgcatttatccatttatccatccacccatccatccattcatccatctacccatccatccattcatctgtctgtctactcatctgcttgtctgtccaagctcttaggcctgttggaggaacaaggagtccagtgtggctgcaagaggcagtagataaggtcagaaaagtaggcagaacttcacttagatcttataggtggtaaggaatttggactaatctcaatggaaaggtactggacaggttcaagcaggggcgctgatggcatctaatttccgcactgcaacaccactctggctgctgtgtggacaaggaactctatggggatgagaaggaaggcaggaaaccatttaggagactacttcactcatccatgtgagagaagagggcagcctggatgagtcatcactccagaacagacatctctcaggttccactcagggtacacaggctcactcatggctggcattggtttatagccccttctaacacagtgatgtgggaagggcaccccggaatacaacatcatctgcctgaatccttaaaatatttaagcatcccaaatcaccctctaagcaaaaagtcttctttaggttcccagaggttcaattctatgcagtttcgctgcttttcatttacctcgaatggtcccagctggatctggaaacagatgtgtcaacacaatccctactcatgaacgcttcccagccaccgggaaacaggtcatcaattgtaatctccatggaaaacctgattctgtcagagctttgcaaaccccacaggcctgggctatatcagggagcaagttcctgctggcagtaagaacaccagacttccccaaactggaccgactgacactggagagagggtgaacttccccagttctctgaagtcctggcacacttcctgtgctgttaaatcatccccgggtaaacctgaccttccagaatctgtgaaagctagctacttcatgatgaaccacctttctgagtttatcaaccactgttacttttctggctcctacccagccccatctggggagcaatgcagacccagcaatcctggcttctggaagcatttgtcttaaaagagccaatttcctcttgatgtccatgatcagctcagcttccagccaacagaccagatattctctcccatgacccagacccacaggatgctacctgcagtacatgtgaagtgtccctactatgggccactgtcctggaggcatccgcagacctgtccaccattctggccctatggggaaaatgggtggatgccaacacattgagatcatttgcaagtgcacagatacccatgcacacacacattgcttggccagaagttagtttaaggaactggacctctgggaagagtgtggcttgggcagggatattggctgtttacagacagctgctatatgctcagctatgctctgggctgcatcagttggggctgcagaaagacaacagcatagtcctcaactgctgataatttgatgtagagttggggaggttgtcagagggttgacagatagtggagtccatagactatgaagacaaagtggaattcactctggaatttacccactgaggagaccgcccttggagctctgtcctctctgggtaatgatcctgcacaacaccctccacttcaggagctttgtttttcccgcattctttcaatggaaacaatggcttagaggagttctggaacttcctaggtacaatggaattccatcacacatagagtgaggctctagactcaaaaatcctgctgagcctgggcacagaggctcatgcctgtaatcccaaaactttgggaggctgaggcaggctgattgcttgagtccaggagttcgagaccagcctgagcaacatggcgaaaccccatctctaccaaaaatacaaaaaattggccaggcatggtggcatgctcctagtcccagctacttgggaggctgaggtgggaagattgcttgagcttgggaggcggaggttgcagtgagcccaaatcataccatttcattccagcctgggcgacagagcaagaccctgtctcaaaacaaaaacaaaaacaaaaacaaattctgctgagacatgactgctgctgaaaaccacccaaagtgcagcagaaatgattttgtgtagtcagtcttccctaaaagacttcacttgtacaacatggacaggatagattaagagcacatatgcaaaatatgaacccattgtactatgtaaattactcccttttctgacaaccatgtatattttaatttataaatacccatgcattgaagaaacatgaccaactatatagcatttctacaagttgatcaggctcaaaccccatgacccagtttcaaaacgatctagctggaaatttccagcaggaaattattttcttatagtaacttcagaaacattgaacgggcctgaaagtgccctgcctgcctgtccacagtagcaaagctacaaaaaaagcatgcagagagcccctgaatcccgcaccagagacaggatctttaccccccacagtagagaggagaagccaacctgagaacgcaattcggttttttgtttgtttgtttgtttgtttgtttgtttttgagatggagtctcactctgtcacccaagctggaatgcagtggcttgatctcgacacactgcaacctctgcctctggggttcaagtgattttcctgcctcagcctcccgagtagctgggattacaggagcacaccaccacgcccagctaatttttatatttttagtagagtcaggttttcaccaagttagccaggccagtcttgaactcctgacctcaggtgatccacctgctatggcctcccaaagtgctgggattacaggcatcagccacaggggaacgcagttttctatgttaataaactactctgccaccctctgagtgctgtgtcctgagcacattccctcttcttaacgtagttgaggaggtctagaatccttcttttggagtacaggacacatttccgtataactgactccctgactccctgaaacttcttcctgaaggagagttgggctacaaggactccttctcctaaagccagctcctgagagtccaaaacctctaaaaatttctcatccttaccgggtttccttcaagacaccttcagcttaggcttcaggtccaccctgtgacaactttgcactctttttgtcctgccttggggcattgggacctgaaaggcattttctagagccttgttgaagaaggaattgcaagtcaaagctctgacccaagacaaaacccagagatgggtacagcagattcaagcaagttccagcccattcctcagcatggactcattaggcacccacatgtgcggggtcggaggaggtttcaggacaagggtccccctgcgtgaatggagcgacgcctttgacattggcgtccttcctgatggacttggccttggctgctctccatctctagtaggccagggtgggtggaggggcctccctgggacatcacagcccctccccgctgaggagaccacccttggagctctgtcctccctctgtaatgggcctgcctctccctgccaaggttttaaaagcatctgggcacaggtgcgggtgctgccagcctccagggctaataagaggaaactcggcagaggaaaatgaggccgcgtagccacaatgccattatgttttcccagaacgtgcaatgctcccaaataaatgtgtctccagcattatcacaccacaatattcatacggctcattactggttttaattttgcccgttgcttatttactgtctccttccccactttattgccggggtggaagagttattcatccaagcccagcacagaagggccccaaagcggaatttctccagaagccgctggcccagcgctcaggcctcgcaggctccagctcaaacccacacagcatcagaggttcccctaggcggcccttcctgcagctccctgccacgttgactgactgcttttcctgcctggggaatgagccctttctcctttctatgaccaaaagctgtgcggccacctgctacgctggatagatgagcccatgacaccacccagtgattgcctgtgtagtgtgaggtcgatgacacccacacgggccccttcacgtaggcaagccgctgtcatgtgccctctgcaacctgggactcctgcctgctctgctgtgatacagggctagtgcccttcctccctaggcatggctcaggtcccagaagccacactcgtcacaggtggaaggatggcagtgttctctgagctgcatggggaactgagtgtggcattccatccctggagacacctccagaaaggtaaaacccttgaaggaaaggatgcacacaatgacttcataaacatacttttagaaaaaattggaattaatgctttttaactcaaatttgacaagcacagaatggtataaagaagcaaatcactatacctctctgctcatcaacagaaaactcttaaattttggggcttttatatttgatcttcttttacctgtactaaaaaaaaagaaagaaagaaaagaaaaaaaagaaaacaacagaattcagaacataatcttgtcctagaatctcttttttattaaatccctcttccaaaattatgaagtcggcctgtgttttctacaaccagtgttgaaaaacagtgttattagcatgtactatccccttccattatcgtatttttgtccgtaagcgatatattagcataacgaatgttggagagggaaggaaggaaggaaggaaggaaggaaggaaggaaggaaggaaggaaggaaggaaggaaggaatacagtaaagaaggaagaaaagaaacaagaaggaagataaaaagtaaggagagaaggaaggagggagaaaaggaggaagataagaaggaagaatgaaaggcagacaggaaaacagaatgaaggacaggagggagggaggaaggaaagaagggagaaatatttaacaaaagttatatagaaaaacaaaagaaacaaaaaggtttcaaagaaaataaaagacacaacaaaaataggccttcactctcatacatatatcatacgttttcatttctctgtaacttttttcctctcagtgaattatcatggtcatccctttgcgaaaaacagatacaaagcactttcttctctctctctctctctctctcactgcatagtattctttagtcttgacatgctcaatgtattcaatcattctcgtacttatgaacattcagaagatttcttctccctccttcctttaaaaataatgcttttatttccataagttacagccataaagtagaattgctgggttaaaggacatgcatactttaatttcaataaatactctaagactacattcccaaaaggctgaagcaagtcaccatcccactggcaatatatgaagcgcctatatcctggcatctttgtcagcatttaatattatcattcgtatatttttgtcaacttgatggtaaaacgtgttatttcagttttactgtaatttttactttcccattcacaaaggttgagtatgttctcaaaagtttattgacccatttggattttcttttcttgtgaattgtctattgatagtttttgcaaggtttgaaattgggtaacatgtctttttcttcttttgatttgtaaatactctttgcatatgatgcatattaactgttcatctgtcaggcgttgtaaatatttttctcattctgtttaacattatgtcacacacaatttcccacatctgtcaagcctcattgtaaacatgtttaatgcctgcaaaatattcccaagtgggaggatatcgattcaccatcctctagctattgttggacacttagaagtttcttgctctctttatggttttatgaacgattttgtgggaacctctgagcttaaatcttgcccacgttttgtgttatttctataatgcaatttagtacattttgaaaatagttttatttgtaaaagtaaagtcattaaatcaaaaatataagcatttaaaagctgttgatgcatattgtgaaattgcttcttaattgactatttattcttcccctaactccacactcagtctcctttgctggcactgggaattgcatttcttaaaaatgtatgccattgatggcttgaaagagtatcataatattgttttaattgttatccttttttttacctttgaagatcttgatttttaatgtatatgaattctatatgtttgtaggttaaaaatccttagttatatttgtaggaaaaatattcctggttatgatttcaacttatgactttattgacagataagatatttacatcttatagagtcaaatccattggtccactgtaatttttttcataatgttaagcttagtcctctgctagccaagagatcatttcaatatgcactgatgttttctagtttgttgtgtttcaatttctatttgacatttaacattttaatctgttttatctcattttggggtatggtgcaaatataaaatctgcttctttaacctaggtagttttccatcaaattcagtgccatttggaaaatactccttaaatatcaatcccttctaacgaaattgttttggagctctctggtctgcattttagatttgtatacttcttttagtattagtatctaattaatttaaggatttttgcatcataatacattttatctggctttgcaaattctccttcctccaattaatttttggtttaattttattaactggtgcttgtccatctaatttctcctaggtataatttagaaatattttgttccttgcccccacccccacaaaaaaatccttcccacacttcgattaagattacattgaacctcaatctaacttgaagataatttagacattcagtcccctcatttggctgtagctatatttatagctgtctttaactgaaaggtttttttttaatctttatcgttattcgtttctattttcttcaactacattctacaccagtcttctgaaaactttttctgggccaggcgcggtagctcatgactataatcccagcactttgggaggctgaggcagtcagatcacctgaggtcaggagtttgagaccaccttgacaaacatggtgaaaccctgtctctactaaaaaatacaaaaattagccgggcatagtggcgcatacctgcaaccctaactacttaggaggctgaggcaagagcatctcttgaacccaggaggtggaagttgcagtgaggtgagaccatgccactgtactccagcctgggtaacagaacgagactctgtgtcaaaaaaaaaaaaaaggaagaaaaaaagaaaggaaggaagaagggaaggaacaaaggaaggaagaagaaaaagaaaagaaaaactttttctggatgcttatatttgtgatttttaaaattgattattggtggcctggtgtggtggcttacgcctgtaatcccagcactttgggaggcctaggtgggtggatcacaaggtcaagagattgagacaatcctggccaacatggtgataccccgtctctactaaaaatacaaaaattagctgggtgtgatggtgcgtgcctatagtcccagctactagggaggctgaggcaggagaattgcttgaacctgggaggtggaggttgcagtgagctgagatcatgccactccagcctggcaacaaagcgatactctgtctcaaaaaaaaaaaattgattatctgctattaggttaaaaaaggaacttctgcatgtctgttaagagtataattatcatataattataattatagagcattggtgatcacattgatttcattggtgtcgaaaatactaaaattattagtccaattaataatacaattataaataacatcagtaacagtaaaactgtcaccacatctgagattcttttaaaaatagtgttttgcatattcttctaagatgccacagaagtttgtggttagtttttgatttaaaagccttgactcttgacctattaaataggtgaacactttgccagggttttaaattaggaaactttcaaattaggaaccaaatttttctaagactgtagagatttctagtcctctttaaattttctcagaaagagatttctgtgctcattgctgacagaagttgtcacttcactgacgtcatcggtggaattgaggacgaatgtaacactttgtgatctgatggtttccctggacacatttcagccctacaagttgagagaaagtgagtgcccacagtcaggggaggcgcctggtggctgcagccagccttcgtgtgcacaggcgtggagaagacgtcctctccaatgggtaggggaataaagatcgcagttaacagaatcacatagccagcactgcctgagtgctgatcgtgaccagccaatgctctaagggcgtggtgtgcaccatccctgtaatccttttccagctttattgaggtttaatagacaaatagaaattctgtatatttaagatgtatctctgatgttaatataaatatacaatgtgaaatcaccaccacaatcaagataattagcatatctatcacctcacatagttactcttttcctactttattttttttatttgtggtaagaacatttaagatctatatatctacgttgtgcacaatagccaagatatgaaaacaacctaaatgtccatcgatgcatgactggataaagaaattgcaatatatacatacatacatatgtacacacacacacacaatggaatattatgcagctgtttaaaagaaggaaatcctgccatttgcaagaacatagatgtaactggaggacattatgctaagtgaagcaagctagacacagaaagacaaatgttgcatgatttttcttatatgtgaaaactaaaaaaacaaacaaacaaacaaaaaatgttgaatgcatagaaccagagctggggagacgtaggtcaaagggtataaagctgcagtgatgtacgacgaataaatctagatgtctaaatacagcatgaaggctatagttaacaatactctactgtattgaaaactaagacagtagcttttgggtgctcttaccacaaaaaaaggtcaccatgcgagatgatatgtatattaattggcttcactgtagtaaccatctcattaagcaagcatatatcagacatcaccttaagtatacacaattttaaaaaaaaagaagaggagcttgaagcttgctaaggttttgtctgcctaggtacacacaaaacagtaagagacaaatagcaggacttgacactagccactctgcagtctccctcaaaagacacattgcctagttctttttcattttgttgtggatatatatatacacacacatatatatgtgtgcatatatatgtgtgtgtgtagatatatatagatgtgtgtgtagatatatataggtgtgtgtgtatatatgtgtgtgtgtagatatatataggggtgtgtgtatgtagatatatataggggtgtgtgtatatatgtgtgtgtgtagatatatgtaggtgtgtgtgtatatatgtgtgtgtagatatatataggtgtgtgtgtagatatatgtgtgtagatatatatagggctgtgtttgtatgtgtgtgtagatatatataggtgtgtgtgtatatatatatgtgtgtgtaaatatataggtgtgtgtatatatgtgtgtgtgtagatatataggtgtgtgtatacatatatgtgtgtgtatatataggtgtgtgtatatatatgtgtgtgtatatataggtgtgtgtatatatgtgtgtatatatatagatgtgtgtatatatgtgtgtgtgtgtagatatatgtaggtgtgtgtatatatgtgtgtgtgtagatatataggtgtgtgtatatgtgtgtgtgtagatatatataggtgtgtgtatatgtatatatagatatctagatatatgtatctataaatatagatatatataggtgtgtgtatatgtgtgtgtagatatatataggtgtgtgtatatatgtgtgtgtagatatataggtgtgtatatatgtgtgtgtagatatatataggtgtgtgtagatatatataggtgtgtgtagatatatataggtgtgtgtatatatgcgtgtgtagatatatataggtatgcacatatatgtgtgtgtagattatacaggtgtgtgtatatatgtgtgtgtgtatatgtgtgtgtgtgtatatatctattaccaagttatccatgtctacatgctctgttctgtggcattaagcacattcacattgtatacagccatcaccaccatctatatctatgtccagggttttttcatcttcccaaattgaaactccataaccagtaaacaataacttctcatctccgactctacctggcccatggtaaccaccattgtcctttctgtctctatgaatttggctactctatggacatcccataaatggaatcatacatctcataaatggaatacaatcataccttgttcatttgtatctggcttgtttcacttaatatcttcaagagccatccatgtttttgtcagaatgtccttcctctttaaggcagaatcgtatgtcattgtatgtctaccccacattttgcttatctattcatccactggtggacgtctgggctgcttccaccctttggctattgtgccacgcctagttcttgtccatgcgttggcctgatgcttgggagccaacctggtttcttggcagcctctgttccttgtccccacttggcaacatggcatggcccatgcggggaagagctgcgcgatatggggagaagcaaagggtaaaggattccatgcaacaatcactagaggcgcactgatttgttgccaaacagtgtgctaggcccagtagaaccatggagaaagacaaggcaccatttacaggctagtaagatgcgcaaactccagaccataattcaagaaaaaacaaacaaacaaaaaacgctgctgttgaggcactggagagagatggtttaattccacattggagagggttgagtcagaggggcttcatgcaagggtggatcttgatgggagcttgaatgccgattgggatttaataaatagaaatggagggaagagtatttgcctaaaggagactatatgagcaaaaccacaaaactcaaacgtggagaaggtgaagatacgagttcggaggagcacagtagtcctgtttcgttgcgcaggagcacagtcaacttctaacgtcaattacgacctgaacttgggaacttgttaaaaatagcagtcctccccacttcgttcctctttctcttagataaaaccaagtctgcatctattgagaataaaggcagtaggtcagatgaagaagctgtgtctgggaaattatctcgtgaattcaagcaattagagaggaggagaggtggtaaacttctgtaaagctgttttgcaaactaagtcagacattcaagaaagcaggttaatggtgcatccagtgacaacgatgtcagggtatatatagatctatacctgcccgagctcactacagaatattgtcacactctagtggacagcatgttcatgtctgctcagcatctatttccctgtgtttggtaatgccccttggattatccctgtgctttaggtaaggctaatcctacctcactggctcgtagccacaggttatgggttcagggatgaacacgttgatcccggcagggccagtgggactcaagccaagaacttccgttgcaaacgaatgaaaaagataagctgcttttccgtggatttgccaagcttatggaagacaagcttggagctgctgaaggtcaacttgcagaggctactcatgaagaaagccaagaatcagagagagacaggctcctggatccagtcatgcctgaagacacagccctggatgtatcagttatgtaacaaaatataataactcgcaaaattcgtttgtctatctttttatgctggtcagggtatgttttctgtgacagaaggagtcctaattatatatatctattccctgcagaagtatcctttcaaattctatgagcagagccaaggcacaggacagaattggctgcatcagcccaaaagattactcagccaggtatatcagaagcagaattctgatgaaatatgtatgcagataattttaaaatattttttatatatgaatctattttagtctgaatactctcaaggtgtgtacacagtttgagttcaccagataatgtaccaaatccagcttcttcagctgatccactgcttctgttctcaacagacacagactttaatctcatgtaaggggaagaggaggaagtggaaagtacactatctttcagcaagtccccaagccaaggtcacactcacctaagaagttaatcactcattctgcagttaataaatcaccttctgcaaaattttggtaaaagtgtggtttatttaacatatataatagaaattaagaaataaaattatctttatttgcaggtaacataattgtctacatagaaaatctaaggaatatacaaagaagctactagaagtaataagtgagtttaacaatgtcacagaatatatcaataaacaaaataacaactgtatttacatattgtagcaacaaataattggaaattaaagctttataatataatttattgtactaacaatatcaaatatacataaagataaatttaacaaaatatgtgtgggactagtaaacagaaattacaaaacattgcaaaaaaaagacctgacaaaaaatatatactatcttcatagacttattatttttaacttgttagttctccccgagttaagttacaggtttaaaacaatatcaattaaaattctagcaagctttttaaattaatgtaaattgacaaagtgattctaaaatttacttgtgaaggcaaaggccctagaaaagccagaacaattttataaagaacaagtttagaagtgtaagaataccttatctcaaggtttaatacaaagtaacagtaaacattatggtgtggcaggggcaaaggaatagctgtatagatcaataaaacagaaaagaatgtccagatatagcagacccatacatatgtggtcaatttattcttgacaaaagagccaacgtgatttatggggaaagaataatctctcaacaaatgacaattaaacaattggatatgtatatgggggaaaaaatcacaaccctaaaagaacttgaagtggatgatgtacctaagtgtacaaactaaaattaaaaaacttctagaaaaaaaaaaaaagataagtataaaccattgtgaccttgggttaggcaaagaattttaagatacaaaatgtgcaaatcaaaagaaaatattggggcctggtgtggtgtctcacgcctataatcccagcacttttgaaggccaaggtggaaggattgctgcagcccaggagttggagaccagcctaggaaacatagtgagataccatctgtacaaaaaaagggaaaatattgataaaatggatttcatcaaagttaaatactttcaactcttcaaaatatataattttaaaaatgaaaaggcaagtcactggcaaggagaaaatatttccaatatgcaatataagtcttgtggtccagcatggtggctcatacctataataccagcactttgggaggccaaggcaggaagatggcttgaggccaggagtttgagaccaggatgggcaacatagcaagatcctgtctctaaaaaaaaattaaacaaaaaaaagaacttgtatccagaatatgtaaagagctcttagatctcaatgataagaagacaaacaatccaatgaaaaataggcaaaagattgggacaggtacttcccaaagaagatatacgaatggccaataagcacagagaaaaaagcccaacatcgttagtcaacagacaaaggcaaattaaagccacaatgatgtatcacttggcaaaaattaataagactaaaactacaggcataggcaacaaaaaaagcatcaaattagacttcatgaaaactaaaacatttcgtgcatgaaaagaaactatcaacagagtaaagagagatgtgacattgtaagatgtatatttggtctttgacacaatttcctgatacacaacttctaagatccttagaatctcaaaagtgatggtctttttgtatgctaatgattgactggtggctgggggtccctaggaagcttcaggatgggggctggtcactggaaaaaccaaagacaggattagaggagggttaggactttcagtcccacccacattatccagagaggggagaggtgtcgaaggtttgagttggtcacaatggccaatggtcagtggtttaatcaatgcctgtgtattgaagcctccagagaaacccaaaaggacagggatcagggggcttccagttagtggaacacctggaggtttctggaaggtggcatgaccagggaaggcatagaatctctgcacctcttcccctacatcttgccctacacatcttttcatctgcacactttgcaatatcctttacaaaaaataggtaaaagtttccctgatttttgtgagccactctagaaaattagttaaccccaaagaggaagtcatgggagcctcaacttgaatgccatcagtcagaagtttcagaggtccggacttaacaactcgtatctgaagaggaggtagtcttgtgggactgagcctgtgggatctgatgccgtctccaggtcgacggcattggaattgaattagagaacacccagctgtgtccactgcagaatggattgcttgtttggtgtgtggggaaaaacttccacatatttgatgacagaagacttctgtgttgattgatatagggggagagcagaggaagaaacagcttgaggttttctcccctcaaaaggcaatccacataatgggagaaaatacttgcaaattatatatctgataaaagattagtatccctattccacagagaacttctaaaactcaacagcaaaaaccaacctgattaaaaaataagcaaaggaattgaaaaggcatttctccaatgaagatatactaatggccaataagtacatgaaaagatgctcaatatcactaatcattagggaaaggcaaatcaaactacaataagataccaactcacacctgttaggagggatactattaatataacagaaaataagtactggcgaagatgagaaaatggaattcttgtgcactgttcttgggaatgcgaaatggtttagccaatgtggaaaacagtatggtagttcttcaaaagactaaatacagaattaccctattcagattcaacgattccgtttctgagtatataacccaaaagacttgagagcagggtcttaaagagatatttttgcacacccatgtttcgagcagcattattcacaatagctaaaacatgacagcaacccacagtcattgatgaatgaatggataagcaaaatgtggtttatgcctacaatgacttattattcagccttttataaaaggacatctgacacatactacaacatggatgaaccttgagggagttatactaagtgaaataaaccagtcacaaaaagaaaaatactgtataatttcacttcataaggcagaatagtcaaaatcttagaaacagaaggtaaaatggtaattgctggggctggggaaggtgggaatagggagtcgctgtttaataggtacagagtttcagttttgagaaattaaaagagttctcgagatgattggtggtgatggctgcacaaccatatgaatgtgcttagtactactgaatcgtgcacttaaaaatggttaagatggtcaatgttatgttatgaatatttttccacaatgtttgattgaaaatatcaaatgtaggagagaaaggggagtaactggaacccttatttgttgctggtgggatataaaacaatctatttggaaaacagtttcttacaaaattacacatatttgtccagtgtattgaattcagaatattttattgaatatatttacccagcatattaaacacatacctaacatttcccattaaaatgaagacatatgtccacacaaaaatgcttacacacatgtccatagaagctttatttgatggatcaaaatggaaacaacagaaatatccatcaataggtgaatggacaaattgtgttatatccatataatggaatatcactcaattaataaaactgaatgatcctcatgaatcttataatcattatttttggtgacacaaaaggttgcacattgtatgagtccgtttatagaacattctgagaacaaacaaaaagccagggacagtggtgaggagaagaattgaagcaggtggcatgaggacactttttgcagtggtgtgaatattcatatcgcgattgtgttggtggttacagaactgtatatattagtcaaaggccatagtgctcttcatccaaaaaggtgactttttggtacaaaaaagtatatgcaagaaatctgggttttaaaaagagtctcaaaacaagtatatagagaaaatttaaagttttttgggggaaaaatgcaaacctgtgtttctggattaaaaaaaactcaaagatgctcattgttttagtccattttgttgttcttagtccatgttgctataaaggaatacctgagactgggtaatgtacaaagaaaagaggtttctttggcccatggttccgcaggctgtacaaacatggccccagcatctgctcagcttttggtgaagcctcaggaagcttttactcaaggcagaaggtggagggggagcaggtgtgtcttatggtaagagaggaagcaagagagcaaggagcaggtgccaggctcctttaaacaaccagctctcatgtgaacacacagagcgagaactccctcatcatggcggggagagcaccaagccatccatcaggaatccgcccccaatgacctaacacctcccatcaggctccaccttcaacatcagaggtcacatttcaacaagaaatttggacgcacacacatctaagccatatcactaattctttccaaattaacgtattcgacttttgtgattctaaacaaatcttaacagaactttgtgggggacagatgaaacttgacaaaacgattctcaaatttacatgggaaagttaattgcttataatgccagagaaagttgagtaaaataaaataatgagggaaaactatttttttttactccacatacacccgtgtgtagtgatttccaacctgggttatgtgtgcatgtgtgtgtgtgtgtaaatgtgtgtgtgcacataggtgtgtacatttattttgttgtgggcaacagtcacagtttgaagaaaggataaaatggtggttgctaagtcctattgttctttgtttttaaaaataatatagtttttaaattatgcagtaaatgatgaagagattcttttatgcatctgaaaagataaaaaaatgagcttaatttttttaaaagaaagccttctttacccaaagtaactgaattaaataacgggatgaatgtaatttttttacatgtcaggaaataaagtaaatatttacctaaacttgaaatgtaaactaattttaaagaatggtggcaaaaatatgatgcttttcaacctctattctttttgcttctctgcgcacagtgatgtgctcaggcgtcatgctaagcatttgggcagagggttccacaataaaagaagtttttcttttttttttaaatttgcctttctttctatatagaattcaacaatatataaaattataaagaaaaaagtaagaatcctctgaagtctcacacctttgaaataaccattaataacacttggaataagctttttattatagattttctttattcatagaaacatacatatgtgtaaactttgtaaaaatggaataatatcacacgtgctccatgctcaccctttctaacaacccacatatttcttcatactcctataattctatgaacacctatacacaaaattctccaaaattctatttgtatgtgtacatgcatttatatacatgtactctttggaagattttctattatttgatttacaggaatggaatatcttccattctttctgcattttaatttcttgcttaacaataccttatagcagctcctcaaagtcacagagtgtagctcgaatcccttctttgccctggctccatgccattccatactgaaggcatagtcctctctttttggccattttggttggtaagcatttgctctgttttcagttttggggccagtgcaaacgatgctacaataaacctctgtatgcctgtccttatggatttgttctttcagttccatggggtaatttcacaggagggcaattgtagggttggatggtagatatattttttaatgttgaaatgatgttgccagactgcattcccaaaaggttattttcaccagcaacctgtgacaatatctcctttcttcaagcctgtcaatattagtcaatagtacatatttttatttttgaatataaaatatcattattcatctaagtgacatttctttgaccactgttgaattaccttaaatgtcaaaacagtaaaacatttcaatatcaagaattatacagaaatattgacagtgactattggtagcatacatttttcttgaatgtcctaccatagcactgtctggtaaaaatttctgtgatgggccaggtgtggtggctcacacctgtaatcccagcattttgggaggccaaagcaggtggatcacctgaggtcgggggttcgagaccagcctggcaaatgtggcaaaaccctgtctctactcaaagtacaaaaattagccaggtgtggtggtgcacacctgtaatcaaagctactcgggaagctgaaggaggagaatagcttgaacctgggaggtgaaggttgcagtgagccaagatcgcacctctgcactccatactaagggacagaaggagactccatctcaaaaaacaaacaaacaaacagacaaacacatttctgcaatgatgggaatgttccatattctgtgttacccaatatgatagtcactagccacaggcaagtattgagcacttgaaatgtggctattgtgagggattgaatttttattttatttcatttaaattcaaatatccagatgtcccttgtggctactatattggatagtccagttctagaaaatacaagttaaaagattaaaacattgaaatatgcacttatcttttttctgatatatctaaaaatctcatgatattttattaagaaaaaaactactagaaataataagaacttttttcaggtaactacatataagctaaatatacaaaaatcaatagctcctttacttagtactaagcacttggaatataaattaggtaaaagttcatatacactaacaacaaaaatggcaaaatgctaaagaataaatttaatggaaaagctatataacatatccaacacaaattttaaattgtaataaaaagaataaaacaaaaccaaatacctagaaacgtatactatactcttggacaagaagatatattatcatatacatcaattcatctaaaattaacttataaattttatcaattctaactagatttccaagaggttaaaatgatccttgaattcatattgaagaatatacctaaaatgtactaaaaatatataagaataaagtgagtgaggcttaatttatgcactactgttatcttctcaagagccattgtagtaaagttaacatggtgtggacgtaagaagagacaaattggtttatggaaattaattaaaaatctagaatttgatcccagtatatgcaaagttaagagctgacaaatatagagttttacttaatgtgaaaaaatagaccatttaatgaataatgctggcaaaattcattatctttataaaataaaattttaaacttttattccattaccataggcaacaataaatttcaagataaaaggctcagataaaacaaaagaatcttatgataaaaatcagaagacactcatacaatccaggggtcaatgtagtcttcctaaataagaatagaaactcagattcttaaaaattaaagggaggttatatctctcttaatataaatttaaagcatttgtttgacaaaatacacagtaaacgaagtcaacacacaaatgatactgtagaaaataatctttgaaacaaggctaatctccacactgcataataaaaactcaagcaaactaatcagaagaaggcaaacaagccaatttcaaaaagaaaataaggaggaatcatgatgagaaaatttacaaatctaacccagaccctgaacaaaattagagaagatgtacaagtcccctcttgttgacgtcctcgactagctctgcctctcctttgtttctggtgttcgtctacagtttctaggaacataggagaaaaatcatcactgccacagcaacagaatgcagaggaacatatgataggtttcccattattcagattgacaactgcatgtcaaataatcaaaagcaaaagatcagacctgtaattccagtactttaggaggctgaggcaggaggatcgcttgaggacagaagttcaggaccagcctgggcaatatagcaagaccccatccccaaataaaaataaacaaaaattagctgagcatggtggtgcatacctgtagtcccagctactcaggaggctgaggtgagaggatggcttgaggctaggagttggaggttgcagtgatccgtgtgcatgacactgccctgcagcctgggtgacagagcaagagcctgtctcaaaaaaaaaaagaaaaaagaaaaagcaagtcgcttgtttcggatacgcccactgagcagacacaccgccttcaccaggtatttttaattctgtgggccagataaggagggtgaacaccatcttacagcttacaccagagccagatcccctaaatctactacagatgctgcggtctcagagccttggtaaactgggcttcaaaggggcctaaggacctgtcttcctcaacccttgcttggacctgcttgaactccttccctcagcctccctgatgggtgattgtccaacgtccatttgatcatcagccccaattagtaaggaactcactctccccgacaatgtaagaagaaaggctttctcattctgaacccacaattgcttccctccaagttctgtgttctcagacccccaaatctcccagggggttcctgtcatctgcacagcagggatgctttattctatgggaatctttgagcaagtctgaccagtgggataaacgcacgtttggcctcgccttggacagatggccgtggtgagtttccgtaacatgccaacacctcacctgatcctcagaggtggccatctctgggtctcactcagctcctgaactatccaggtcaccacactcacctaagacaaggtagaaaaatcaacttctaagccccaacttagatgcgcttcatcagcgtccctgggctcatcggtccggcgttcgtatttcaaaatgctcccaggtgattctgaccctcagctggttttgaaaagccctagctcagaggagctcaaacccaggcatcttcagaaaactaccaacacactttgattaggattggaaatcccaactttctggctaccgatagtgttaaactgctgatgtttcccatggccctttcttgtttgtaaattacgttctccaaaaccgaatttgagagtcataacagctcatcaagggatgcttcttacctatgaagacagtgagtcactgagccctactgggtgtaacagtttcaggacaccatatgtgcaaatcagccactttctttctctagaacttaacttactcctaccttgaacctaagttctgagtcaacagtcagttccatttttttttttttttttagatggagtttcactcttgttgcccaggctagagtacaatagcgtgatcttggctcactgcaacctcagcctcccaggttcaagcgattctcccgcctcagcatcctgagtagctgggattacaggcgccctccaccacacccggctaattttttgtattttgagtagagatggggtttcagcatgttggccaggctggtctcgaactcccagcctcaggtgattacccacctcagcctcccaaagtgctgggattacaggtgtgagccactgcgcctggccagtcagttcaaatttaaactcagcccattccgatgtctcctctctgtcctccaaccatatgggtggaggaagacaaagcagttttgagctttggtcagcctctgtccatgcacatctgctgagctgagcatgggtcttttctgttctttgctgatatccagttcactaatggatcagcagagatgtgtatacctcccctatggtgcctgacccctggtccttggtgtgctcttgagcacccaccaggatcaggaggccccacaggaaggccagcccacccccacctattctgtaagcacttcttagggctgtggaaaagcagctgcccctcacacctttaggggatggcaggagctgtgaggctcccctctgctgggatcaccttgctcccaggccagggtgtggagccacttggggcctcccacttcacagcttctccttgggaactgagacccagggattctgtgttctcagacccccaaatctcccaggggggtcacctgctcacagatacttaaccgaggagaaggagatggatgccctgtcccttccatgtggctttctctcagttcacccccttttctttggagtgagaagtgggcattggcacagcaaatattctttgcttatttttaggctaaaatgttaaccttcggaagctcaaaaggttaaaataaataataactgcatgtgtctccctttgaattcctgctctaggtgtattccttggggtaggggggagtaaaaagaccatggaaaatgaagaatagaagagattgctaagactagtggttttttttttaaaagaatatcagtagagtgactctagttaacaatactctgtggcatatcttaaaatagctagacaagaataattcaaatgttcccagcataaagaaaagataaatatttaaggtgatggataccccaattatcctgatttgatctttacacattacatgaatgtgtccaattatcacacatatcctgatattatggacatctattttatatcaataaaaataataatgaagtgaatgcttggcattactatccctcaacagggaaatgtttctaaggtctcggggtgagcaaatagcaaaatttgggccagaagtcagggcccccactagtgagccagaagtctgtgggctgtgtcctgtctgtaggaacttagacttcatctccatcttccccctggggaactcctccagagagaggcattgctgacccttcaaagcaccaaagataacaacaagtcttcttccccaagcaggtattccaggtgagtccggggtgtagaagactccctcgaacaaagggtgtcctctcctccttagctcacacaggctgcccaggatgaagactccgtgggagtttgggacctcgaatgggggcttgtttcagttctattgcatggtgaggcaggcttctcatcagagaccttccccctcccccagccgggagactgacaggcatcacaatactgcacgctgggccaggggacagtgagtgacagcactgcttcgagggacgattaattctgcacaaggaggtgttctctcctggctctgccactcacctactttccagcaccaccattgactgacagcgcatgttactcctgacctcacacatcactgggtataattgccgggggctcgttattgtcattaacgtctcctgcatgcacacgggagtgcctttcaccccaactcacgcatcacaatgaaggctgcacctgtggggtgccaaccacaggcctgcagtcctgggcttggcagggacttctggggccagactatggttgtccacagtggcggtgtccgacattccagcaggtctgtgatgcctgtcccactgccaggagtctaagagcctctagtgctgaagagtttgaagagcctacctttgcagtggacccttcttccaacacacaaccaacccagagccgacacacagcagcagctccttagcctgtcataacctgaaatgtgtatattcagaaaactaaagctcagagctccctagggattatctagtcctaatccttctatttcttttctccttttctttttttttttttcctttttttgagaaggagtctcgctctgtcatccaggctggagtgcagtggcacgatctcagctcactgcaacctctgcttccctggttcaagcaattctcctgcctcagcctcccaagtagctggcattacaggtgcccgccaccacgcccggctcatttttgtatttttagtagagatggggtttcaccatgttggtcaggctagtctctaactcctgacctcagataatccacctgccttggcctcccaaagtgctgggattacaggtgtgagccaccgtgcccagcccctaacccttatttttctagatgagaagattaagatccagagaaagctcttaaccagctcaagctcaccaacaattactgatgtggtgaggcaaaatgtgtttgtttgtttttttcctccataagtgcttaacctggatttgcgagtccccggatatattcactacacttaaattttcagtgtagtaatgaaatttttgagtgcttgctatgggccaggtactgtttcttttgttattgcttttatcgttttttaaaatgttgttttccagaaatggctgttgaatatttatttagttgttgctgttttaaaatgcatacaattgccagacacgattttaagtacttaacttttaaaaaatcatttcagtctctagataataattcgatgttaaggccgggcatggtggctcactcctgtaatctcagcactttaggaggctgaggtgggcagatcatgagggcaagagatcgagaccatcctggctaacacggtgaaatcccatctctactaaaaatacaaaaaattagccaagtgtggtggcgggcgcctgtagtcccagctactcaggaggctgaagtaggagaatagcatgaaccagggaggtggagcttgcattgagccaagatagcaccactgcactccagcctgggtgacagagcaagactctctcaagaaaataaataaataaataaaaataaaaataaaaataattctatgttatgcactattctcatttcatactattcatactagtttcctgccatgaaggaactgttcctatattcatctacattctcaaggatatgtgaaacccttgatatgatttttgaaggtgctacatatcaccttttcaaatgctaacctggaaattttctgtctcaaggagctaaaaactgttctccccacattacccacattttcaaattgaacaacacatttctaaatattccatgggtcaaagaggaagatctcaatgaaaattaaagattcataaaattgcaatattgtgagagaaatttatagcagtaaatgtttacattggaaaaaatgaaaagtctcaaatcaacaattgaagtccctatctcaagaaaatgaaaaaaaaagagcaaagtaaacacaaaaccagcaaaagaaagtaaaaaagatccaagaagaaaccaatgaaactgaaaacagaaaaacagcgaagagaaagcataaaacaaaacaactacttctttcaaaaaattattttaatgatcaacctctatcaagactgaccaaaataaaatgagcaaggacacaaaacgtgaatgtcagaaataaaatgggctattactacagatcctgcagccattaaaagggcaagaatagaatactatgaacaacttgactctcataaatttagcaacatagaagaaatggactgattcttcaaaaactgcaaaccacccaaactcaataaagatgaaatagataacccaattagccctataaacattaaataaattaaatttttaattacagatctctttttaaaaagttggtctcactagaaatttctactaaacttttaaagaataattaacaattttacacagtgtttttcagaaaacaaaaaaggaggaagcacttctaaacccattttgatcccctaaaccgcacaaatatggtacaaaataagaaaaactatactctctagctctcatgaacttagttgcaaaaatcctcaacaaaatattagcaaatcaattcaccaacataaaaaattaactagacaacacaaccaagttagatttatttcagatatgcaagattaattcaataatcaaaaattaatcaatgtaatccactgctatgatttggatatggtttatttgtccctaccataactcaagttgaaatttgatcccaaatgcagaggtgttggaaggtgggtcctagtgagaggggtttggatcctggggacagatccctcatgaatggcttggtgctattctcatggtagtgagtgagttctctgagactggattcattctcaaggaaatagattagctactgtgagagtgggttgttatacagccaagatgccctcaggctttgtcccttcacacatttccacttcctctttgaccttcaccatgttttaacccagcacaaaaatccttaccacaagttaagcagatcccagttccaggccctttaatcttcctggaccaaaacatttttaaaaattatgactaggagaggaatctgacatagttgactccatcttgcttctaacctcacaagctgtctttgctcattcctgggcataggccaagctaactatgggaggaatttacctcatagtttaagacaaagatgatcacagtcttttcccaaaactaaccccctcttttcttgaggaccaaaaacacatctttgtaaaactaacaaattggccacaaagttagaattatggtaggaccctaaagtctgttaggaggtaggtatagttaaactctaaccagtcattgttttataatttagcttttcatatctgcttactgctcaggagtcatgtggccagaggacacaagatttgtaacttctccagttgatcctatatattacatcacgattgtaacagctaagattggtgtttaagatatttttcagaccctgcattctgacagaccaactgatgccacctggaccaataacccacaccaagaaactgactcaacttgttttgtcacttccacccaggaaatgactcaatgtaagaagacagctcctaccccctattatttcatctctgacccaaccaatcagtgttccccattccttaggacccctgcctgacaaatcttccttgaaagccctagcctctgaattctcagggaggtggatttgagaaatctctcccatccatccattcggctgccttgtgataattaaactttttccctgctgcaacactgctatctcagtgtattggctttacactgtgaagcaggcaagaagaatccttaaaaaactcacagagccatgagctaaataaacttattgtctttataaataacccagtctcatatattctcatatagcaacacaaaacaactaagacatacaccacattaacaagctaaaaaagaaaaatcacatgatcctatggattgacacagataaagcatttgacaaaattcagctctcattgattaaaaaaattcagaaaaagaggaaaagaagaaaaatccgtctaccttataaaaagtatctacaaaaacctgtggctaacaccatccttatggtggaagatggaatgctcttcttctgaaacagggaacaagggcaagggcttctccctcatcactctcactcaatatagtattggaatttccagccactgcaacaaggcaagaaaaggcatacaaatttaagaggaagaaataaaactccctttttgcaaatgataattgtctacacagaaaatcccaaggaatccacaataatcaaaagtggaattaataagtaagatctgcaaggacacaatatagcaaatcaatcccattcctgcataataacaataaatatgtgtcaaccaacatataaggtgaatataatttataattgttccaaaggaaacaaaatactgcggtataaacttaagctccctctatttcatgtttttgccatgtgacatgcctgctcctgcttcaccttccatcatgagcaaaagggccctgaggcctccccagaagaaaaatagatgatggcgccatacttgcacagcctacagaactgtcaggcaatttaacttcttttcgttataaataaaataaaaataaaacactaagcaaaacatgtacaagatctgaaaactacaaaatgttgatgaaagaattcaaagaaagtctaaataaatgaggagacatgccatgttcatggattgaaagtctaaacacagcaaagatgacaattttccccaaattgattttttaactacataatgggcaaaatatttgagtaggcaccacacaaagataaacgtgtagaaaatgcttaatatcattagtcatcagagaaatgcaaattaaaactacaatgagaagccactacacacttaaaaaaggtggctaaagtaaaaaaaaaaaatgatgatatcaattgccgacaaggagctggagtaactggaattctcataaattgctggtctaaatataaaatgacatgatcactttgggaatcgtttagcattagttctaaatttaaacatatatgtattacattactcagtaatcccactcctaggtatctccatatatctatacataaacctttatgtaagtgtttacagccatgttacttataatttcataaaactgtaattaatccagatgttcatcaattggtgaatagaatcaaatgataatgcatctatgcaatggaatgctactcagcaatgagaaaaaaaataaagaagcagatgaatctcaagtacattgtagtgggcattccatgtgaaaaaaatcaaggcacaagagcaaggcactgtatgatttcttttatgtaaaattatagagaaggccaaattataaccaacagaaaatgaaacagaggtttccaaggcttagggctagggaatgggattgaatttgaagaggtgcaagtgggtgatggaaatgttctatatcatgactgagtagataaatgtatgcgtgactgtgcacgtctaccaaaactcattgaattatgctcttacgtttggtaaattacatgcatgtaaattataactcattaaagctgatatacaatttaaaatttgcataaaatgaagacaaagaaattaaaaaaaaaatctgtacactcttgcacaagttggccgagagagaatggtgcacagaataggcaaattggataatggaggagaaggagataattgaagagcctgagtcacactggccatagtggtccaaaacaaggtaacaggtgtgacccagcccaggcacttcacaaatatttgttgagtgggtgtatgaacagaatggcagaagtctgagaaagaaaaaaaaaatagcctctggcagctggcagctgggagctggactggtgctcttggccatggtggtcttctattaaacatagacattttcaaccaacaccaacatcagaggttgctctgtgaccatgatggagtgagacaaaaacaagactctctctaatcatttctgagtacagaccaaaagaaaagcacagcgcaaaccacatcaaaaccaaacattctctcctctctgcaaatgtgggtgagtgaggttccttttttgatatttagccccacttcatttctcaggcttccagcatgcagatgaagacacgctggcatagaactgcccccgattcctgacagcactcaagccagagcacacctttgatgtgctcccaaataaccagctccaatatcaacctaacacaagttcaagccctgtaagatgtccccacaacacaatctgcctcagtttcccaccatttcccatggtgtgcaggctacaggtggtctccggtggtcttaggctagtcattgttggaatcatcaaaccctatccatgcctcctcggagctctcgttgcttgcatgtgtcctcagactataacattcatgtgaaaagtgccagggtgctggcagtacccacttacccacctacgtagatatcagcatatgagggctgcagcatgttggacccagcagtgagcccaggttaattggttcacgtcattatgttacagcttgggtgtcaccagcaccagcattcttgggggaatccacagctagggacaaacattggtggcctctctgcctcccaaagattggggaacagaggggacagagcagtaaatcaacgaacaggagtgccccttgttggcctgatatatacaaggtttctatgagcttctgggccagtgtattctagtagaaagatgccagattacctgttcaaaataccaagggtctatcccagcaccaaccttatgtcttatatattttacactcctggggagtcactcgcatgaagggtacccctgacaccaacatgtgggaagggggagaggaggggttggtcatgccattcctggacagaacagacagccgtgagaatgcggaaacatccccgctgttggcaggtccttccagagtcaaacctttcaaaagaacactcagacatgttagaaatttaccctccctcactgtggctatatgcaaatatttagctataatgtttcttttaattccataaaaagaaagggaaatgatataaaatggtaccaacctcagtattcaatgttgagagactgattaaattgatacattcagataattaaatactatgcaaatatttaaaatgacagaataatatctgatagaggaagatgtatgtccatgatctacttttcagtgaaaaaatatcagatcataaaataatgcatacaatataatcctgtttcataaaaatagtcatataatatgtgcacatataatatgtgcacatgaaataaatggctggaatcaggtccacatggagagtggttggaaatggtaatttgcatttttttgtttattctgtgtcttcagaaacacatctacaatgaacttatatctttcatatcagaaataatgaaggcttagggttttgcctttgttattggcctgtcgttcagagagtctacatcacaggtgagtttgagcagtgtcagaaatctgatatccagatgggaagaggctgcatttccgacactcagggctccccacagctgctgtttcagacccaaatcactcttacagctcaaccaaaatcctcccactgtctgagattaacgactccacccttcaaggctgagagctggaggaaagattgctaagaacactatatgccaacatgttttcagatacttgcatttctatgtcacctaaacaaagcaatgcttaccaaaaattctcagaatcccagaagcacaaagttgctaaggctgagcaagagtgatgggacatggtcacggtttactggtagagctggcactgctttctcctgtcccaagcccttctccttggaccatgctgctttcctcgtggtgagtgcttccctgtggtttaaccaaggaagaagacgttcctacgagaacaacaaatagattgaatacaggagctgttgggccagggggtatgtggggggcattttccccaaaacttcaagaataaatctccaaaccagtgtctttcagatgcagggatggtgctcaggataggccaagcctgtgtgaaaaccctgcagacagccattctcagggcagttgggctgccctgcactgccaaggtggtcttcccggggccttatgtccacaactgtatgggctccagggctcgcctagtttcatctggttgatttcatttcctctttctttctttccagtgatgaggttggtgaggacagtcttttacccaacccctgcataccggtgactcttatgtgagagacgccggcctaggctactatctcctgggaacagatactaacgaaatgtaatttcactgaggccacaacacatctgagaaggacaaggtgatgtggggccagccatcttcatcctaaggctccggtgcaacatcctgtgtccctggaggcccaatttgacaaacccctgcccaaggtgagcatccatctagcagggggaggcaggcttagcccatccgcatcgccctctagcctgggtccccaagagctaggttgcctgagtcactcgaggagctcagagcacataatcagactctccagagtccaggccctgcaaactatagtttggggacattcaccaggtggttctgatgcacagggaaaatccactccaattgtgcaaatagtgtatgcatggggagccttgaacccaaatcagcttaggcaaagtttacttgacatggcctgggtacttttaaaagaaaaactctggacaaattaaatttaacaggtttaactgagcaaacaatgattcaagaatcgggcaagcctcagaactctattaggtgcagagcaactccagggccgccttgtgattgcgcaacatttatagaaaaaaaaaataaaaaaggaaagtgagctacagaaaacagaagtgaggtacagagactgctccattggttaaaagttggcattgccttcattgaaccttgtttgaacagttggcctgcattcaaggatttgggaatttcacctgtaggggctttgccatggagagagagccgtgtggagcttatagggatacacaggaagatcctggctagacagggagttgctccctggaggtgcctgctaaccccatgccaccccatgatcctgcagcacggggctcctctttgttcagcaagttcatctctaaacacaataaagctgtcagaaaacactcatttctttagagggtgacttactgacatcgttagttgttgcattttcttccccagttgcaaatgaatgtttcttaaaaacagaagccatggatggtgatcctgactcttaatagcagggctgttggtgacgagccatgtgcatcctataaaaacacccacctagtcctccaacagggagatttgccttgtgcaagaatctgcacagaacactgaaggttagaacagcaagtacttcagacacgaataatgcccattagaatactctttttattttcaaaagtatttctttacccatagaaaccctacattccctcctccactttcagcatggctcatcagttcatagcaaagttcaaggcagaaacgaatttttcaatattttgccaatggctgctctacgatagaattggtcatacaggaaacaggggcattttaaaacacaaatatgttggctgggcctagagcagggatctcagttgttcctgcctatgagaaccatcaggaagccccctccacagaggctcagatttcatttttctgatataagccagggcatcatattttttcaaaaaataaaaatacttacaagttttctagtatgcattcaggcttaaggaccactggcccagcataggagacataacaggaagcattaattaagcaaagctgggctgagcacttatgtatcgggcacaatgcttgaaggcaggtgagttttcctatggtggaatcctgaagctcttatgctctgtggccagtactaataccagagcaaaggggaagccatcttgaacaccatctctgtacacactgtttcagcaaagagaagaactaccaacatcttatgttattcaagcaagactcaacccagcctaccagggtagagagaaaatctgcaagtgacaagggaagattggcaaaagagagagatgtaagcacaaagattgtacattttaaaaatctccagtaattccaggatatggacaaatgtacaagctgatagccaaagagcatataaggattttaataccacatttccagttacagctagtgaagcataattgggtactaaattacaatgttaatattcatttgaacaagtaagtgctgtacttggactagtagcatcaggaccccgggagggcagcagaggggctgcttaagtggacagagagcttctctggatgagttttgtcctaggtttggttaaggttggttctcagcagagtcttgagaggttacaacatggattgtggttgatgggatttctcccattgcagtgatgctcaaaggattcggaattaagcaagttaacatacaagtaattacaaactgcagttggtaacacatgctagaaagaaacagagaaaagaaccccaggagaaggccatagtgagaaggcattcaagacggcagatgtgcaatgggggaggaagtcctgaaacctgctgcacaatttttctagcacaaatagaaggaaagggtcttgcttgaggtcgcctattattgcggacttatctatttatacctccatttcctccaaacagagtctgaggtggggctcacctgtcatctgcaagaaaattaaagtcatttcttaaaaggggcaaaagcaaattgaagtaatgaggaggagggagagaggaggttaaaagagagagagagaaagggagagagacaaacacacacattcacacacacacacacacacacacacagccatatgtatttgagttcctttctaaaatccaaatcttacatagagcacaattttccttttgcccatttctcaaggaacttgttgtcttcctgtgcaatttctttgggcttcatacaaaaggtaagattccatattaagtaatactaattagctaggacaatcttgagtatgtaacaaaagcaaatctatcactagctgtgggggaaaaaaatagtcctcatctcccccaaaccccaaaacacataagctcagcattttaactggctgggatgagagccattattttcattaatggagctcatttttattttattgggcttttttactatcagattaaaagcatgtttttattgtagttttttctaacgcaatctgagatgatgtgctcaggatgaatggaatagttattgttttaattattttttcattctgtgattttattttgtttgttccttttatttactactcttaagtttgtcttaataacatggactcggggtgcttggaggcctccagtcatcatccccgcggtggtttgcatttgctaatgaccaaggaacagggaaatcactagcatgcggatgcttttggaactgagtcatggcccagccttcctgttgaggatgcccaggttagggccaagggcatggactcccagggttggagggagcaacacagcagctcccagaagcacctgatgtctttccaggacatttctgtccctgcgtctgctccaggctgtcctggctcactaggtcaaggaaaggctggaagggatctcaagggagggaagtcagcaaaaggacatgttcctcacctacagccacatctctccctgatgcccagttccatatgggatactgtcagaacacacaggttttcacacacagaggcccatagctggacacaggcacgtgttctctgccttgaaaaaaaaaaaggaagaccacaaaggcttcccagcaagtttagatgtcttggggaccctgtgggcctaggagaaccagaaacaagggcagggcagagttgcttacttagaacagaaatcaagtactgctttgggagttagctgtccaggggccaagctgaaacaataccggacactgcaagttactcagaagcccgaccctcagccctgccatttgcaacaacacagatgaatgttatgttaaatgaaattagccagacatagaaagaaagcactggctgggagtggtggctcatgcctgtaatcccagcactttgggaggtggaggcaggcagatcacttgaggccaggagttcaagaccagcctggccaacatggtgaaatcccgtctctacaaaaaatacaaaaattagccgggcctggtggcatgaacctgtaatcccagctactcgggaggctgaggcaagagaattgcttgaacccaggaggcggaggctgcagtgagccaagattgtgctactgcactccagccagggcaatagagcgagactccatctcaaaaaaaaagaaagaaagcactatgtgatgtcacttatacacagagcctaaaaaggtcaaatacacagaggcagagagtggaatgctggttaccaggggcagggagctgggagaacgctggtcttagggtacaaagttgcagcaatgtaggaggtgtaagtccagaaatgtaacgtacagcagggagattacagttactagtagcgtattgtttgctggaaatttgctaagagagatttcaggtgctctcactacacgcccacacacacacaaagggaactaggagaggagacatggatacgttaatttgcttggcgggattaatcattccactaggtctatcagaacttcatgttgtatgccttacatatatgcaatgaaaatattgggcatataaatgcccataattgcctgatcaaggattcatttggggtcacttgtgtgccagtactcacattctctgggcctgttctccactgtgactgaagaaagaatctgtcttcctcacgagaagccttggcctgtgcttgggtttaccacagtccctccctctctctaaagtgtcatcacggactctagttgcctgcctgcaccccatttgcagaaggagtccccaaagtatgctctagtttccaagcctgtttgaattaaaatctggcaaagaactaaagatcacgttactccctgctcaaagggcttcccaacacattcaatataaaatctgaacactgtgtggccccaagaagccctctgtgacccgaccctctcatcgttatcctcatctgctcccatctctgcccagaggcttcacagagaggctgcctgtcattacctgccatgccccccatggctcctgtgccctcacctgtcttcctttctgtcatggctctgtcatccctgactggcattagttatgcttttattgactatctctccacctgagaatgagcacatgagggaaaaaattttgtctgccccttcatcaccaccgtgtctccagcacaacagccctaggtacttggtaggtagtcaaggaatatttggaagatgctagggctctctgtttttgtttttgtttttttgacagagcctccctctgtcgtccaggctagaatgcagtggcatgatctcagctcactgcaacctccatctcccgggttcaagtgattctcctgcctcagcctccccagtagctgggattacaggcctctgccaccatgcctggctaatttttgtatttttagtagagacagggtttcaccatgttggccaggctggtctccaactcctgacctcaggtgatccacctgcctcggcctcccaaagtgctggaaatacaggagtgagccaccgcgccaggcctagggctctcttttcactgctgcatcccctgtactgggaacagtcctgggcatatagtagatggtcagtaaatgcttttcatccagggacaagttgaaaaagcactgggcatgtcaacacccagatttgcataaccaaagactcctttgtttccactcgtgtcccaatggatgaagaaggaatttcaggagtgaaggtgaacctaggactcaggtatctctttccagccctcctcaaacccacagaatactgcggaggtcactttattttgttactgaacaaaggtaagggatataatgctttaaaatccccataaagcctgcttgttaatcaatgttgaatcactaatgcaatttattacatcctttgattcatacatatccatttcacaagacatattctatctataccaacattttacacaaggatcgaaacagaatattgagcacagtttaacaaaatctaggcactaatttctggaaataaattctacttatcaaaaggcattgttcccctaagggaagcaaccactattatctaaagaactgtttttttcataaagataacttggaagaatctaccgtgcctttggagaaaatacccagattcaagttacatacacgaaagacttgtatttatcatgatccaaattcacaacactcaagtgccaaggtcgcatggtctccaggaattctgagtgggagagatgaattcaccatcaataaggactagtatattgtccttgaatattgcacttgtgaattccatattgaataagattctattttgctccagagttttggagttatctgtcattttgaaaattcttgatctaagctcggcagactttggttagttctatttggttctatttggttggttagcaaatataaccaaccatcccttaaaaggtgctgcaggagacaacaaagctgtggatcacgggtttataaaaagaaaatgttcggcactcacaaataattgcacgtcatttggctggcagtatgtggaatgcaagtcagaccttgtagtttaacctcagggttgagctgcatgcagatttctgcattggttcactaggaataatggatgactactgattattattacatattatcaaatgtatattataaaaattatatcattaagtattatataaatataatcacaaagatggcaatggccaaaacttcgtgagtgccttctctctactaaacaacatgctaggccccttacaggcatttttcccttttaacgaccacgcccacagcggtggcaccattattcttactttcagatgaggaacgtgggacagagagaggctaggttgcttgcccaaggggatcactggtgcaaatgaggccccggcagccaaggggaatgaggtgtgaagctacacacagagtgaggggccatggcaaacccaagggctgagctgcggctgctgtggccatatctccacatttcaagagaaccgcacatcctgatttcaatttgcaaacattaaaaacgtgatagacacagatgaaacacagctccaggcccacagccaatcctctgggcaccatttggccaactctacaccctcttcctttgctcctgtgctgtttggatggcttgttttttcctcccccacgaagttgtagagttctgagaacaaggaccgtatctcacacagctttcatctccttccaggtaacaccagtgctggctgggagtatgcgatggtacgctggggacagatggtacccccaaccccaggatccaaatcctgcccagtttgccttcttggacacaggggctcatttggagtctcagcgtccatgtcttgctaccttttacgtagcaactgtgctctaaaatgaagaagcaaagccaggtgactcagtgggcatgggggtgcttgtgactgggggccagagctgcagggtctgtttcaggggcggtggggccctgtcagccacatgctcagacacccagatctaaacaccttgcagtgattatccaggcaaccctgagtctagaatcttccttctccttgcacatcttcttcaccgtaccaatttgaagcaatactgtaaagtggtaccagctcagacacacacacccagaacatggaaacttgtatatacacactcagcacatgaggacatgtgtgcacatacccagaacatgggagtgtgtatatacacacccagaacacgagagcttgtgtgcacacccagaacatgggaacatttgtaaacacacccagaacatgaggactcgtgtgtgtacacccagaatgtgagggtatgtgtgtgcacacccagaacatgggaatgtgtgtatacacagccagaacatgaggacataagtgtgtacacccagaatatgagggtatgtctgtatacactcagaacatgggaatatgtgtattcatacccagaatgtgagaacatgtgcgtgcaaaccaagaacatgagaacatatgtgtgcacacccagaacatgagaacatgtgtgtgcaaaccagaacatgagaacatgtgtgtgcaaaccagaacatgagaacatgtgtgtgcgcacatgaggggctgtctgttcacaccatgtgatggctaattttaggtgtcagctcgacggttaagggataccaggatagctggtatggtaaagcattattttgggtatgtgtgtgaagttgtttctacaagagttaggcgtacgagtcagggagctgagtaaggaagatctgccttctcccaatcaaggcagacaccctccaattggatgagggcccagatagaacaaaaaggccgagacaaggtcagtttgctctccgtctcttctgtgtctggaacacccatcttctcctgaccttggacaccaaaactccacattttccagcctctgaactttgagacttttaccagttcccctaccctctgttcaaaggttttcaggccatgggcctaggactgagctgcaccagcggctgccctggctctccagcttgcagatagcatactgtggaacttctcagctgccataatagtgtgagccaagtcccatagtaaatcccctctcttctatttggctagctatatctatttctatatacatgtatgcctatatctctatatcctatcagttctgtttctccagagaaccctgattcatacatgccagaacatcagaacatgtgtgtctacaccaagaacaaaagaataaagttgttcggcacactcatcttacttcaaagacaggcgttgttggagaaaattcaagatcattggttttgcatttctccagcccagcaatgaggggatgagggaggtactagtccacttgggataactaagaatggattgtcacttttcataatcagggctggctgatgggaggaggcttgctgtggggaaatgagggcaggacggggagcgtggctgtcaagtgccctaccaggctatgagcctctcaaatgtaggggttgcacaagagtgggcttagctcagccagcatctacctgtgaatgatgaaattgacttcgaggctagtgatgggtctgcaatgctgtgttcccattatttgtttattctggttggatctgtccattctgactcatcagagaaaagcaggagatgaacacagggcatattgggcattctgtgtttgagttggtatctcagaccctgctaggctgcaaagcacacacccagggacttgaggggacacccgtaaaggagggcttctctcccatacgctgccactccactgccgagcaagctccagcactaaccaccacctcctgcacacagtaagtccaggatttaatggctgggcttatctcatgcgacgttcccaaggctccatttttcatcaagcaatttttaaagagttttatgaccctgtgaacaataattttttttagtgaaagcagactgaatcgtaagtgatggtaattacaccaaactaattgtagacaaaattagtaagaggtcagatccgtttagttacaaaagaaaatatatgcttggaatacaccttaaatgatctctgggaaattaattcatcatggaaataaaaggaatcttaaatcaacagcgactctctggtaaaacatttgcaaggaataaggtttcctctttagttttggttttgatttgatgcccaggtgtcagcctgcaccaggattgcaacaggacccaggacccaggcgtttacttcagtgcagggaggaccctgcagacatttcccatgactagggttctaactgagtcatctcctttaacttagctcacaagatccttcatggcctgggcccttctactttttttttttctttcgagacagagtcttgctctatcacccaagctggagtgcagtggcatgatctcaggtcactgcaacctctgcctcccggattcaagtgattctcctgcctcagccccctgagtagctgggattacaggcatgtgccacaatgctcacctaatttttgcatttttagtagagacggggtttcaccatgttggccaagctggtcttgaacttctgacctcgtgatccgcctgccttggcctcccaaagtactgggattacaggtgtgagccaccacatctggctgcacttctactccttgtaggtttatttcccaccatactctcactacctgagactacctcagtgcctttgagttaaacaggatattcctcctggaacttttttcctgctatttctctacccatctaaataattgcctctagatcttcaggtgtcacagcccggtgttgtgaaggacagggggattacttgcctcccatatggactgggtgtccctgctctgtcccttacagaacacagagatttcatgctcacaagtgcttttgccactgttcagggacacatacctgctaggggtgggggacccaggacctggtgactgtggggcagacacacacccggcaggctgggcagtcaatacatgcttattataacactgattataaatgcttattcaatgaatgaatgggtccattacctctaagtcactcttcagcagccacatctggctgttcccctctctgctcaaagataaacagtgcctaaaggaaggcacccttagcatatcctcacctctagtaaattccactgccggggtttaaagcgtggtttggaccaccattctgagccaaaacgtcagggaaatattcaaatttagatatgaacggggaagaggaggaggggaagaaaaggaagtggtgaagaggtcagaggaagagggatggggtagccagatggacgcatgaaaaaaccaatccttacaccccagtctacctgagttgcccagccactgaaaggcagggatgcctgaagaccctggcaccaagggaaaaaaactccagcaagtcctcgtgggctctgggtaaagaaaagaggctcccaggaggaaagcccagtcagaattcaagttttggaagagacaagatggcctcaaagattcagatccactctgaaatcttttagcagtagcttcagccaagtagctctaagaaaggccctcagagatacaaaatctaagaaaaatagtcctggcatctaattacaacagtgcagtttgctgcttttatctgtaattggactgtatagtctttcattctaatttactttacatctaaactgtgataatcaagacaagcagaacagaatggtctctgactggctatcctactgacacccgttaatgcctaattataacaactaaattaaagatgtgactgtaaagaggtggaatatcagtttgaagcatttaattctgtgaaaagaagtctagattttaaatcctaagtaagaaaatcaatactatgcctcattatattggtattgctaaacagattaatgaaataaagtattttgttgtgttgcttttcttttttccaatgttctcctgatgcaatgatggtttgtaatgaaggactactgcaggggaggaagtttaaattgagagccaatttatacacagaaattgggagatagctaatctcgtttatagagcagcggctttcttttgatatggttggatttttagataggcatcatgggtctcgacttctgcagtctcgtagaacaaaaataaattcaactcaagctaagcagtggtgctgtctttcctcttcctatgaacagatgtgtcaacggggactgctgtgacagtgtcagcatctatgagcaccagtttgggacaagcatccctgaagctttgtgtgccagtggccttgttgtctatgccaggctaaatgtagccacctgtgaaggtttaagagacacagggaagctgggcaggtgaatggagaatatatgaggtccccaaagccgttcgattggttggaaggtggaggagaagccatggaggagaagccatgagaagcagccacgtttcaagttggacaccaaagcctggaaggagaaggaccaaggtgtgcagagagaagatgtcctgttcctgggaccagggagggcagcatgtgcagggtgatagcagcacgctcccaactcatccagcaacactctaagttacctgtttatttattcattcttactattgcccatcctgactttttcttttttttcttttttctcttgagacagggtctcactctgtcacccaggctggagttatcatggctcactgcagcctccaactcctgggctcaagccgccctcctccatcagcctccagagtagctcggactacaggtgtatgtgatcactcctggctaatttattttattttattttttgtaaagacagtgtctcactatgctgccccagctggtctcgaacttctgggctcaagcaattctctcgcctcagcctccaaaagtgctgggactacaggcacacaccatcatgcctggctattttgtgtgagtgtatgtacagatggggtctcactatgttgcctaggctagactcaaacctctgggctcaagcaatcctcccacctcaacctcccaaagtgctgggattacaagggtgagcagccatgcccggtctcatcctgactttgaagccttggaactcaacatcaattataagaatcaaaaacctaaaaagtggcaaaggctgtgtcaatcaccctgtgggacttccccaaatcccatgctgctgagattcaccagtgcaggtttttgaggaatccaaagaccttgcagaatagactgaccacctggaggaatctctagaaatcacctagaagtgaccttactgaccgctgagttactatgagtgaatgacttggggactatagtgtgccaggccttttctggagctggggacacaaaaatgagccacactgagtcctggccccttggagcttgccatttccaaaccactgggtcacgcaggggtgagagatccagcaggagaaggggagcacaaagccggggccccggacaatggagaaaacttcagctttggtgaatgtatccagaacttcccaattataaaatcaacaacagctgggtgcagtggcttatgcctgtaattccaacattttgggtggctgaagtgggaggatctcttgaggccaggaattcaagactggtctgcgcaacatggtgagaccctgtctccacaaattttttttttttttgagatggagtctcgctctgtcacccaggctggagtgcagtggagcgatgtcagctcactgcaagctctgcctcccgggttcacgccattcacctgcctcagcgtcccagcagctgggactacaggcgcccgccaccacgcccggctaatttttcgtatttttagaagagacaaggtttcacagtgttaggcaggatggtctcgatctcttgaccccgtgatctgcctgctttggcctcccaaagtgctgggattacaggcataagccaccacgcccggcctccacaaaaattttaaaaattagctgagcatggtggttctagcttctcgagaggctgaggcaggaggatcgcaggagcccgggaagtcgagactgcagtgagctgtgatcatgccattgcactgcagcccagaccacaacagagcaagaccctattaaaaaaaaaaaaaaagacattttagttttaaagtctaaattagatctaaatgggcatttttggcgatgagaatttttggctgttgaatgttgcttgtaccaccctctctttggattcctgttgtctttcccaatttcttaagcacatgaagatgtggaggcatgggcagggggtgccctggggaccgtgcatatgggctaagtgatcattgcaggccagagagaggttaccagcccccttagaaaggaatggtgcagctcctgaccctgcagggccagacaggactctaattgctcctttgcttctgggactcggaagacaaaccctgccgtctcccaccaggcccgcctcccagctgcacaaacaaagccaaataaaaactgccagcggccgctggtccccttgcgacagatgtggtgcctctgtgccatcttgtctgttcttaagggtttgtttttattgcaaacagacagatgtggcttgtcccttccatcttgtttacgatgctgcaggaacacctgtggaagaacaggtccctgcagaaatccttgacttccgttcagatggcttgagactaagccagccggctgggcaaccccatctgctaaggattccaggttcctctgcccagggaaacctggagaatcacccacaggataatcccagacacaggagtgtcactacacctatgtgcaccttatgttaacaatgtgtacaccttcattcaaacctgtgcagaggacctacgctgtgtgcgctgcctggccctgcagtctgcactgactgacttgtggttcagcccagcttctcactgcaaaggctgctttcattgcctgacctgtgtccacttagctatagaattcactgcattgagaacccacagccctgacccacgagtgagggccatgaggcttatgaggattgccttattgattctcccggtttcagacaaagtggctcatgacctggtgtggaacagacctgtgtcaccagggtgaattctatgcctaggtgcagagggaaggggaaatgcttgcacagagcccaggcttgggcgatatcctctgctctcagccaagctctgtacaccttcttagaattctgcggctccagccacaccattatagatcgcttgcctagcacttactttatttcattagcacagatgatgggagagcagtgacacaacttgtaactttgtgcaacaactgcctctttgtcttaaccttatgttttcatgccacagcttttgctgtgtaacaaaccacccccaaaactcagcagcttaaaaacagccactatttagttagctcacgactctgtgggtgggctgagtggttcaggcagcctcagctaatcattgctaggctcactcaggcatccaagatcagccggtgagtgggctggtggctagaagaactcagatgccctcagtcatacaactggcagctggcaggccgttggccagggtgacaagggtaatggggccacatacctctcaccaagcaacagcttaaccctggcttctccacatggtgaccacaacaagagagtgaaatagaatgtgcacatgcttttcaagtctgcctgtggtatgttttcagctgccccattggctaaagcaggtcccaaggccaagctcagagtcagtgtgggagcttgatgatgctaagagcttggagagcttagacaccagcaggagggataatttgcctccagttttgcaatccaccacaggatttttttaaaagaaatgtcttattcgttttctagcctcttccatggaatgtttccatcatttatcttcaatgtttagtgtttataaatgaggaagaagttcagttttgtttccctaattaattcacaagtatttagaatgtatctttaaattgcaattgggttaaattttctgcctaagattttcctttttttctacttctactatattggggtcatggaatttgaaattagtcctattctttaggatttttaaagccatgtgtgtgggtgtctgggtgtggaattctcattatcccatggatatttgaagactgttcagttttattgtttgatataactatatagacgcagatatatgtagatttatatttagatagagaatcaaccttgtctgtaatgtttttaaattttatctatgtttattatctgcctgatctgttacattctcagaggagaatgtcacattattgtcatatagtttttgtttgttgttgttgtttttattgttttttgagatggatcctgtcacccaggctggagtgcagtgccacgatcttggctcactgcaacctctgcctcctgggttcaagtgattctcctgcctcagcctcctgagtagctgggattacaggttcccaccatcacatcaggctaatttttttgtatttttgtagagacagggtttcgccatgtttgccaggctggtctcaaactcctgacctcaggtgatccacccgccttggtctcccaaagtgctaggattacaggcttgagccaccgtacccggcctgtcatgttgttttacttaatatatttttgtgccacattgcacaaggaagtaagagttcattaattatataggaattatgttgattcttatatattcttggttaagtaaattttttatcagtataaaacaattgtcagggcacagtggctcacacatataatcccagttctttgggaggccaagatgggaagatcagttaaggctaggagttcgagaccagcctgagctacatagtgggaccccaccctgacaaagaatttaaaaattagccaggcgtagtagagcatgcctgtagtcctagctacttgggaggctgagacaggaggatagcttcagcccaggagttcaaagttacagtcagctatgatcaagccactgcattccagcctgggcaatacagaaataccctcttaaaaataataattaaaaaactcactttatcttccttattcctggtttcacagaattccctatcgtactgtaatgagccaaaaattaataaatccacaatagtgagcatgctcattaactagctcattcatatggtgagtagaattctacattatgctcttcttggagtgaaatgtgttaatgtattttgaaattataaaaatgctgatcttggccgggcatggtggttcatgccagtaatcccagcactttgggaggctgaggtgggaagatcacttgagcccaggagtttgagaccagcctgggaaacacagtgagattcccccatctctataatcaagaaaaataaataaatgaataaataaatagtaagtaataaaaatgctcatctcacttaaaaattacaatgtttattgagataattatagattcacatttagttggaaggaataatacagaatgatcatagatcatatacactcttttcctagtttcccccaatgatagcatcttaaaaaccacagtataatttcacaacctcatactgacattgatacaactcagcaccctcattcagatgtctccagttttacgtacgctcattggtgtgtgtgtgtgtgtgtgtgtgtgtgtgtgtgtgtagttctgtacaacttaatcccatgtgtagttctgtacaacttaatcccatgtgtaggttcatgtattaatatttacaaccacagtcaagatacagaacaccacttggtgaaaacactgtccttcatccattgaatgggttttaagcctttgtaaaaaaaaatatggatcacttcgtgaatttgcatattatctttgtgtagaggccatgttaatcttctttgtattattccaaacttttattatatgcactaccaaactgaggcctgctcatactttttgacttaccaatgccacttgtgtaaataagtttctgaagatgaagttatattctccaggctatttaatgcagtaatacttataatagcaaataaaagaggaaagaggcatgtccaaaaatagtagatagaagaaacgtatttgttatctattgctgtgtaacaaattattccaaagtgtaatgactcaataattccaaagtgtaattccaaagtgtaatgatttattatatcacaatgtatgtgatatctgggtgttgctcttctgggatctctaaatgggggcctctcacaagactgctctcaggtggcagctgaggctggggttttctctgaaggttcaactgaagaagaatctacatccaagctcatttatatggttgttggtaggattcagttccaaaggtctcagttactctctggctgttttaagagtcttccttccatttattgctatgtgggcctctccacattgaagcttacattgtcataacgagcgagacaagagagtgcaagagactgctagcagtgtttcataatctaatcatagaagtgatttcccattcatttttctgtgttctactcattagaagcaagttgctaggtccagcccctactcaagaggaagggattccatacaagtgggaataccaggaggtgagatttgggggatctatgttggaagcttcttattataataagtaaattattacacattcatactattacatactatgcaaacattgaattttcttcaataattacattgggtatagggcatgttgtcataagaaatgaaaagagcttctgtaacttggaactcaatatcaagtattctaaaatatgtgaaacataaatcccaaaagaagatgaggaaaatagtgtacagataaaaatatttgaggaaataatgactgaaaatatctcaaattaagtcaaaaatacaaaacctcagatccaagagctcaatgatcctccaggaggataaaaatcaaagtaaatcacaccaatgaacattatattctaattgctggaaattcatgataaagaggaaaaacattaaacaaaccagagtgctatggtttggttgtctgtttcctccaaacctcatgttgaaatttgattcacagtgttggaggtggggctaatgggaggtgttcaggtcatgggagcaaattcctcatgaattgattaatgccctttctcaagggtgagagaattctacctctaataggtccttaaagaactggttgttaaaaagagcccagcacctcctctctcctttgcttcccctctccccacaggatcttggctcccctctgccttctgccagaaatggaagcagcctgagtccctcatcagatacagatgcccagtcttgaactttccagacaccaataattccaaagtgtaattccaaagccaaataaacctcttttctttataaattacccaacatcaggtattcctttagagcaacacaaaatgggataagacacagagggggaaaagactcttacttatagaaaaacaaagataagcataatagcttctctctcatcggagatattgcaagccagagacaatggaataacacctttaaaatgctgaaagaaaatcctgtcaacctagaagcatacatccagtgaaaatacccctcaaaatggaaagaaaaataaagactttttagatgaacaaaagtaagaaaataatcacaagttgatctgttacacagaaatgtttaagatacttcttcaggctgaaaggaactgatagaagattgcaacatgaaggaataagtctacatgaaagaataaaagacctagaaatggcaaatatatggattaaatatgaaatactttttccttatttcttaattccttaaactacatttgattattagaagaaagaaaataacattgtatggtgacattttaacatatgtgaaagtaaaatgtatgacgatcataatagaaagaatgagatggtgattacagaaagtacacaaagctactaaaactaacaaagagatttagccaagggaaaaataaaatgctagaaattatcaatccaaaagtggaaaaaaggagcaataagcaaatagaaaataaatataatggtagatttaaagccagccatgccaataataatataaaatgttgttaatgttaacactaaaaatataaaagcaagcaatatgctaagtgtctacaagaaatactctttaaatatagagaagtagggaaaagtaaaaggaggtaaaaaggcatgtaaacaatatgcatgaaaaagaaaatacagctatattataagcaaagtagacttcaagacaaagaatattcataaagacaaagacagatattttatactgataaagtatcaattaatcaagaagacataacaatcctaaatgaatcaacatataaacagttattcaaaatacattaggcaaatttaacaaaactactggaagaaatagacaaatttacaattataactgaagactttattcttgccccggtggttaagaaaacaaatagacaaaacaactgtaaggaaaaagaatatctgaatattatcaaacaatttaacctattgagctgtatatatccaagaaaacatacatatttgtttcaagtgcacatggaacattctccaagacagaccatctgttaagaaattaaagaagacacaataaatgttatgcattgaaattacatagtattttctctatgatgaaattaaatagagttaaaatagaagttaacaaatataaaatatgtttttttaaaacactactgtgttggaaagttaaacaaaatcttccaagtatgccatgaattttaaaaagtgcaaggtaaattttaaaatatcttaaatgaaatagtaataaatttataatattttaaaatttatgagatacatataaggtagaacttgaagtaattttatacctttaattgcttatattagaaacacagaaaggtttcaaaataaaaaatttaatcttgcaatctcaaaggctagaaaaatgacaaattcaataaaatgttaacagaagtaaggaaataataaagataacgaaggtaatcaataaagtagattatttctttgaaatggtaaataaaactagcaagactgaccaaggaaaaacacaaacacatattcaataccaaaaataaaataggagacattactacagattctacagacattaaaaggctaatacagggatagtatgccaagaaatttgacaattttgatgaaatttgacaatttggattaaaatatattagaaatgcacaattattcaagcatatccaagaaaaagaggaaacataattagttttatatgtagtaatgaaattaaattcaccagtataaccttctcacgattaaaaccttttcagatgacttcactgataagttctcttgtgtatttatagaacaaatgatacaaattattcacaaactttttcagagagtagaagaggagaaaatattttccatgtcattttatagagccagcaaaagccttataccaaaattagactgcacaagaaaagaacactgggccaggcatggtggctcatgtctgtaatcccagcactttgggaggctgaggcgggtggatcatgaggtaggagattgagaccatcctggctaacatgatgaaaccctgtctctactaaaaatacaaaaaattagccaggcatggtggcacgtgcctgtagtcccagctactcaggaggctaaggctggagaatcgcttgaacccgggagacagaggttgcagtgagtggggatcacaccgctgcactccagccagggcaatggagcaagactctgtaaaaaaaaaaaaaaacactacagataaatatccctcattaacatagatgataaaattttgtactaagtactataatatttaatttaccaacatatgaaaacaataatacatctcaaataaatgagattatcccccaaatacagggctgttataacattttggtgtgtaattcactacattaaaaaatgaagcagaagtactataagattatctcagtagatccagaagaaaaacctttgataaaattcagcacctccacttttcatcaaaatagaagtagtaggaaacttcctaaatttggtcatgggcttcggcagaactcccaactaacaaagttacttcaagttagacaattgatagattttcagctaatcaagagaaaggcaaggatgtttcttctccttgtactgaaattcccagtcacttttatatatgaagaaaatcctaaggaaattacaaagagaacaatattacctggactaatacatgaatttagcaatgtcacaatatacactgtaaataatacaaataaattgtatttctatataatagctgtaaaaattagattatacaatttaaaaaccatactcaatagacataaagtacttagagataaatttagcgatagatgtacaagaaatttacatgaaaaacaacatataatctctaagagaaattttaaaatatctaaataaagatctgtacctacttcatgaattgaaattctcaatacttccaagatgtcatttcttcccaaattgatctattgattcaattccatgccaagcaaaatccaacaagccttttttaaaaagaaattgaaaagctgtttctacaatttatgtaaaaatatatctagtagagccaaagcaatttttaaaaagaagaacaaaggctttcaagatttttttgtaaagtaataatagaaaaggtactatggtttctgtataaggagagacaaaaaaatcaatgagacacagcaaagaatctagaaatagattcaaatctatagggtcaataaatgtttgacaaaggcactgaagtaattcttattgcaataatagtcttttcaacaaaacattctgaaacatctcaatatctgtaaggaaaaaaataatattttactgctgtcctccatcacagacaataattaattcaaagtaaactacagacctaaacctaaaagctaaaactacaaagctcctagaagaaaacataagagagtattttcatgacttcaaggcaggcaaagatttctcaggggggaaaaaaaacaccaaaagcatttaacagaaaaacaaatgaactccatcaaaatttaaaacgtccacttatcacaggatattgataaataaatgaatgggataaccaaagacaaggagaacgtcaaatgtgtcaaatggcttatatttagaatataaagaagtcctactcaataataagatagagcaaaagatttgaacatgtatttcacaaagaaagatacaggaatggccagtttcatcaggcgcatatacattaatgagacaccacttcaaaccttagaatggctacaattaaaaggagtgaccataccaaatgttgagaatgaggagcacctggaattctcatacactgacggtggtagagtaaaatggcatagccattttggacactactagggctgtttcttataaaattacacatacacataccccatgacccaggtttgtattccttgacatttatctaagagaaattaaactatatgtccctcaaaattttgcacagcaatgttaatagaagcagcaactacaacaaaaaaggaagcaacccaaacatcaatcaacaatagaacagacaaataaattgtggtattttcatacaatgtgtactactcagtgattaaaaaaagatactaatacatccaaaatatggaagaatttcaaaaccgtcattcttactagagaagacagacaaaataatgcatactgtatgattccatttatgtgactgttttaaaacagatatgatgaatctatcatgataaaaatcagaactatggttttctctgaagagagaggctaagaatgtactgagaagggacatgaaagaactttctggagtgtggaaatggactatatcttaacacggatgtgtgtcactctagtgtgcatatttttcaaaactgatcaaactgtatatttaagatctatgcatttcactgtacgttaattatagagcaatacaaattttaaaatcttaactgataatcccgtctctttttggcaaactcctgctcattaattgtagtcctcaaaatgaaccctttcccccagccccaaaaactcattttgcagctgctatcctgccaagagaatgaaatggcaaactccagtctaatgtactttcatatgcattttttttcttcaaacacattctcttgcacctgcaacattgcactatataaaaagaatagataagaaaaccagatggaatctcatccaaatttattactaaagatagttcccaagtgaatggcagtaccacctctccttcatagccaggcagacatagcagttcaaacatttctttctgagtagtgtaaacacttctctggtttgaaagtttattaagttttcattaaattttgatattgtcctggctgcaagtgctagctggttcatacacttgaaagagcaaatgctcaaactgttcactatatttggtcggcaaaggtccctcccatttttccctcaagcccagtcaaaatcctctctggagtctcaaacttacagaaccctagacagagaaatctctaagcaaggggctattataagcatctcaagaaactcactacctttaacactgcaaccatttgcaccagtaacatcaaggtttgagcctcttcaaatcaaattttccaaccatgttgatcaataatttaaaaagactggaaaaatctatttctaaaatctgtttaaaatgttcctgggtacatgtgcaggacttgcaggttttttatacaggtaaaacatgtgccagggtcgtttgtttcacctatcaacccatcacccaggtattaagcccagcatgcattagctcttttccctaatgctctccccctgcccctgccaacaggcttcagtgtgtgttgttcccctccctgtgtccatgtgaacttattgttcagttctcacttaaaagtgagaacatgcagtgtttggttttctgttcctgcatcagtttgctgaggatgatagcttccagcttcatcaatgttcctgcaaagcacatgatctcgttccttttatgactgcatagtattccatggtgtatatgtgccacattttctttatccagtctatcattgatgggcatttgtgttgattccatgtctttgctattgtgaatagttctgcaatgaacatacacacaaccccagtaaaatgtgggcaagggaaataaacaaacacttctcaaaagaagacatacatgcagccagcaaacatacaaaaaaaagctcaacatcactgatcattagagaaatgcaaatcaaaaccacaatgagataccacctcatgctagtcggagcggtgataattaaaaagtcaagaaacaacagatgctggtgaggtggtggagaaataggaacgcttttacactgctggtgagaatgtaaattagttgatttctaaatttttaagcaggatacgtaaaatgcaaccaataatgttcagcttctggtggaattctcagaaaattccattccttattctccaaagaaaaacatgtttgtagcccctctcaatccaccttagtagatccagaagtcctaacacccccaaactctaatactagttgaatgcaaattattaatttcacagtaaaaccaatatgaagatggtaataaaaagaagtcattatgttctctcagatacattctttccatgcttacaactaatatctgtctcctgagaatctgttagcttgcatcaattcttgccactttgaaatgaattagggaccagtatattgggattggcaaaagagagaattcctgaagactggcaagcacactcctaccacctccttcttgaaaccactccaaccccagctctttatctgattgtgttagggaggctaggtctgatccaacatggaatgtcacgatgtgatgggagtcaggaaatctgtctcaactctgccactgtgtaaccatgggtaagccctttgttttcactcccccacattgccttatctgacaatctctcatttgtcttggctaagaattataggaatcattttgtgtaaagattcctgaaaatataaaccaaccatggggaccctccttaacattccatcatcaaactttcaaacatactgcatctgttcccatcttccatttttccttcctgttgcagtgagcaactcttcttgcacctaaggccaactaatccacctacacttgggatctcggccttttctgtcttctaagacagtggttcttaatcctggctgcacatgtgaatcacctagtgagcttctattgaacacacacacacacacacgcacacacacacacataccccatgccccaacctgcctccagaaaggaactgtgggggataggaatagaatcttggacatcaacattttttcaaagttctccaggaaatttgaatgcacaaccagagttgagaaaatctaatctagaaaaattgtgcaatccattattgtttctgtgggcactggttccttcccattcccaccatgcatttagaacacaattaagtcccctactacaaaagttcctccctaagtccctccacccctctctgactatcacccaattgtctcctcacaatatattgccatttgtacttgtttcattcgattttcttaaaccttaaacctgtggtcatttttgtcacctacttctttctcacttccataaaatccataaactctatccaaggtatttcttgaatatactcctttttctccactttcattgccttctcttcagttcaaaccatcaacttttctccatgacttgctgtagctagtggcctccatctaggttttcctctatccacttggtctgaaccacatcctcacgcatacatcacagagcaccagagaaacttcacagtggcacaacccacatcatgagtttctttcacatttcaactcttgtaatgcttctgtacattcaaagacatcattaagaagtgaatagataagctatagactggaagaatatattacaacaacaacacacacacacaaaacacaatacacacccacaaaacacaatacatgcaacacacacacacacacacacacacacacatttgtatctggatacaaataattaggtccagaatattttaatagtgtttagaaattctaaaagagaaagcaatgagaccaatagaaaaaaaatgcaaagcagccatttacaaaaatggccttgtattaatcagagaaatgcaatttgaaaccataacgacacaccaattccctcctccaaaatgggatgatattagagagcctggcaatatcaagcattggaaataggaattaaaataggcagctggaggttatacaaatagatacaaccactctgcagaacaattaaatttaaaaacatgcataccctgtaacccaacatctctactcctaacttttcaactaagaaaaatttgtacatatatatataaatatgtagctatgagaatgtttatggcagtatgacttatagtagcaaagaaaaaaagagatgcttatagagtcatcaaaggagaataacaattcctgcaatggaatactatgtagcagtgaaaatgaatggctcacagaaaaggaaatcattgagattgaatctaataaacatgatgtagagcaggtgcaagtgacataagatatcagacagtgtgatcatttcataaagcctaaaggaaataaaaatactgtatttgcctagagatgtgtacatattatcaaagctttcacgaaaaggagtgtgaagttaggacttaagtacagatcgtttatttgggaggtgatcccagaaaacaactgtaggggagaggagaagcgacagggaagggaaagcagccaataagaagtgtgctacttagccagctagtcgttggcacttaatcctgcagggaaattctatgtcctgtgatagctcatcagagtggggagagacctggggtatttatacaccaactccggtccacctttttctgaaagctgcagaggaggaggaattaacccctagcacttctagtctcacacagtggtggccaagtaacctctggtggccagagaaagccctcaggcaaaacaacaaaaacaaaaataaattactagttgatccctaatgcactaaaatgaaaaaggtgaggaaatgtgggtggagctcttgacagcagctgccatatataatgagctaagagcatacaaacaagcagaagaatgagaatgccatatccagaatagattaattttgagagctaagaagggggtttaaccaaggagaaatacatcagtgtaactacttttattttgttttatttcttaggcttttagatgggtagctgtaggaaacagcctgaagcctggattgagtaaacagtcccttatccacaaaggtgaggtcagggtattggaagaccacagggatagtggtggatttaaacactggctgggcgcaaggggaaagggcagagagaagttgcagaaacccagaaccagaaataaataccgcttcactctccttgcatcctccagtctcctttgatcacaccaagcaagaagccagaggtggccagaggagtcacccttccaggcacagagtgggtgggaaggtggagagttgacctggaggcaaagagaaggtgatgagcacagttggtgtgagttgttttttatatatatataaattttatttatttatatatatattttttatttatatatatattttatatatatattttatatatatatattttatatatatattttatatatattttatatatatattttatatatattttatatatatatattttatatatattttatatatatatattttatatatattttatatatatattttatatatatataaattttatatatatatttatttatatatatattttatttatatatatatggaagtattatatatatatggaagtattctatatatatatatggaagtattctatatatatatatatggaagtattctatatatatatatatatggaagtattctatatatatatatatatatatatatatatatatatatatatatatatatggaagtattccatatatatatatatagaatacttccagtatagctgaaaacatttaagaaatatctccctaatggcattagattgccttggtgttagatcgctttggtgttagaacaccaaaacctaatatggccatctggtccgcctcccaccccattctgtagcccctgctagggccacctccatggtgcacttttgtcacttgcctccttgtggccctgtgatcctccatcctttcctgtcctcagggtttccgcagatgcatctcctctggcattaaatacttttctccccttgcctttgctcagccaacccttatttaactctaaggctcccatttaaatatttcactccaaagaagctctccctgataccccagaccacagaagtccatctggtgcatacattctgtatgtgttattctccctgctaattacactttaatagcttatttatgatatcatcagcaccggcaccacacgctcaatagccacgatctctttgggttctgaggacacagacaaaataagaatctggactttttccgtcacatagcctctgttaccccagtggaggctcacccccttttcaaggctcactgagaaacagaaaatgacaacgattttggaaaccccagtattaaaatatcttctccaggtttcttacctcatccttgcaacatggtgatgctcatttaaccccagggccttagctccttgtaaaatccatgcctaacacccacgcacaaaaaatgcagcatggagcttggaaggtctttaggaggaggtttgagaaaccctagtgctcgaggaatttcaaatccatctccatgattcaatgatataaattctgaatttttctttctgaaatttaagatctctgatagaagatgactgtaacataagtgatgggccaggcgcggtggctcacacctgtaattccagcactttgggagactgaggcagctgaatcacttgaggccaggagttcaaaataacactggccaacatggtgaaaccctatctctacaaaaaatacaaaaaaaattagccaggtctggtgggctcatgcctgtagacccagctactggggaggctgaggcaggagactcgtttgaacccgggaagtggaagttgcagagagctaagatcacgtcactgcactccagcctgagagacagggtgagactctttctcaaaataatagtaataataaacaaatgaataaaaaagacagaactggagaagccaagcattcccagccctctgatgagctaggtccacaatgggtcaccaggtcacccccaggcaggcaggtatccctcgtggccacacctgaagaaacagtggagcccaggctattgtctggagcaaatcacagacacaggactgggaaaggacctaactagaaccaaatccatgcccatgtaaataggaatatcattaaatatataaagaaacatgtaacatataaatagaggcatcaacatatatgtaaataaaaattagaatagaaatgtttatagatacaacagtctagggctgtgtgccattctatagcagtgtttttctacataggaggaaagcaaacatatatacatatacatgaacctttacatagacatgtatatgtgtgtgtgtatatataacgtatatattcatatttaaatagatactgttaattatttataggtatatataaatacctatacatatagaaataacatacatacatataaatgtctacttgagatatacacaccacagcgtggtgttatgctggtatgtgccaacctctcacacctggcaaggccactctgctcaatggtgtctcttgagagggcagggtcggccggcctctccctgggggaaaggcccaccttcctttgttctgctgtcttccaagttcctccacctttgcatgcagagtgaacaggtggtgccagtctgtaggcaagagccactgcaggcctggaccggggtgtaaacatgatgtggagccacagcaactgagcgtccaccaatcaccaagctgggcaagaacacgcagtgacaatgccctctgccctcccgcaccctccccagacttctgtgagtgtcaatgtcaagactccacaccaaacattttatgctgagtctggaagttggcagtttgcttttattcacaaccctgggcaaacctgtgcaggagatataatcattttcccaaaccaagggtgaggtatgtatctcaggagagctaagttggtggcctcctccacagaggacctcatataggtccacctttgagttttgggtgctgttataaaccaggtaagtctcttccctagcatcacatggttattaacgggcagagttagcattaaccctggtatgatcccaaaaatcccatgccttctgctgtagcaagactgcccggagtgagtgtggcccctgggtgcgacccccaacccaccctccccattgccaggcaaccttcatcccctgagagtccctccacccaacagaccccctgctccataaagatgcaaggtggctcccaagcgctccctctggggagctcagtcctggcctcacctttccagacatggagcaatttctctctgagacaggcagggaacataatgaatgaacaagaccttaaggaaaaaagagagcaaatcatatttttctttcttttgagataaaaataatatgcctgcacatcagatctcctgtgacagagctaatatccaggagcaaaatcagaaaaagcatcctcctcttgctaataatgtgaacataacaacgggctcctctgacgaccacagtgccacaaaagtccctgtcaagccatagtctgcaatgagacctatgagagttcaagaggaaagtcttccctttgcttcactttatccctattcgctaagtacagccagaaaataaccgtaaaaattaacctaaagcttaatggcttatgtaagaatgccttaataaaaatatgttggcaaggttattgaactatacaattaaacccctcccactcgatacttttcagtctaatttctatctaaagcttattcagcaaacccaaatgccaatgctctccttcaatttccacttctttgaacctgctaatttacgaataagaaaggatttatttgtgttattagccacatgtaaccgcttgttgaaaaagtacttttaaatactgaaatcctgagatgcctcgagattcaccaaatatctgaaggatgactttgattttttttttcttccacaagctgtgtttgatttacatcaattaggccctccacataaggtatcatataacaggaaggctaataacccagaaataacctcattaaaagagacagcatatcggtctaaacagaatgaactctaagcagaaaaattagtgacctggaaagtagcagggagaggtaatggcagtaccaagaaaaaatacatccccgttagcaagtcaaaggagaaatcaccagcaataatgtaagaatacaatagaggcagaagcagaacatttttgtaatgtttttaatctgttcaaatcctggaacatgcaatttatttttcacctggtcaaaaatactctctgaaatcatgcatgtattccttgtagactcaggcacacaaaagggaccctcgcaccagcctgtccctaagtgggatgtgttgactgtgtctctaaggtcagctggtttccagggctctgaattttcccaccatcgtgaacactttctcagatgggtgagcccctcttggactgccacccacctgataccagcttatgccaggaatttttctccttgacataaagatgcaatctgctctatcttatggcacagcccatcagaaacacaaagctccccttctgcaactccttgttgactccaagttcccccctcccaccaaattcccattttgtgggcgttttgtaaatgcatggtttgccaagaaatgactgtttctacgaagcctcgtgcatgtggtgttttttgtttgtttgtttttgtttttgttttttaaaaaaagaacaagaaggtggtcacatcagagggaagccatttctaatggtaaaatgcagcagaaagaggaaatataggtgttgcccccagctccctggacctgaagagtctggtgcatcatgggagatcctggaagactgtattcaaatgctgctcagctcctgagtcaacagagtgatgcttaattaaagaaatagagataagctttaaatgtgtgtaagtgtttttacagagcacattaagacagggattgtagtggagtccctgagaacctcctgattcactcttatctgaatttcccatgggccattcctgggcaggtcaagccagcagataaaattcacttctccggggaccctggcttttgaggaattccccagcagcagggcatacgggagcccaagaccttgcacaaccccagaagaggatcagaaagtaggaggccagagcctaggagacctcgggaagaggctgaggcctcagcctcaaatgaccaatgctggggccacctccagggctttggggctcggggccaattccagtcatgcaatctgcatcattcatctcctgccccattcctacttagagttcagagtaccaggatgtgagccagaaatcttgatactaccttgaggtctgaagggagactcatgactgtacaaagaagcctggcaggatatctggtacttcctgcagcccatctccctgccactcctctgatctccatgaaatcacacctccagatggacaggtaactgtgagactatgtggcctggaccactaggtcaacacactgctcctggttttcagctgacactccctttctttctccaatgaaccctctgatccagcacctcgcctccccttgggagccaagctcacgctcacctacatgcctttgcccttatgccctttcccagacccaccatcgccccaggcagcctccttcctctcctcctagcctaacccacacaactctcaagtacaagctcatttcccagcaccccagaaacccttctcaatgctgtctgtcacttccagcatcacctcccggcctagctctagaatcatgcaatccctccctttttgtttggttctgttccttaactattctggaaagatgacaaaagcaaattctgcttccctagggcaggaaccacagatatgggttcctgcatggccagggctgatagttcagcaaaggcgacttggagaggacactggccaatggaggggattaaggggacagctgtttccatgtggttaggtcagaccagcactgccaaatgcaaatgttctcttttaccaaaaaaaaaataaataaatttagaaattataatttttatgtgaaatcttctggggttggtgaaggaaataatgtatacagtgatctatttccaagccaaagtgccctaagtaggcttcggtcagcaaactacagaagtaacaggatatactaggcccctgcttccatagccaatgcctgattgtcagcctcccgcttcctcccaccttagttgccttcacctgagccaaaagtgcagtctaagatgaaagtttactagcttgcgaaatagctcattttgtctgttcttatcagcctgcccagctacttagatcataagtcaaatacttaaagagcccctaagctaactaggattgcaatgcattgtgggctgcgacaaaatggagcaagacaacccaaaaaaaaaaaaaacacctagagcctctacccaacaatcaataggcaacatccgggaagactgtgacagcatagtactcagcctatgaggagctgggggagggacctgtgccctaagagataaattgcttgttgaaactgtgctgggtgtgcctgtctatcaaaaacattcagtcttgcaagaccatcattaaaagtctcactttcgctgttctctgggtctctgagtccattctttgggcttggatgggtgagtttctcacattggcaacctatgctacagcagttttaagcatgagttagccaggcagagcctattggtggccatcccagtgcatgacctggaggctgcatgctccctcccaggtgatgggaagcggcttcccaggggcctttctttctccaataaactcgctgatccagcacctcacctcacccagggagccaagctcatgccctagtaggtttgagtaggtttctctggcctgttgcatcttcccacacccctgctgctaggtgcccacctctcctacagcctacctggctgcagcccaggtgtgggaagatagaagggaccagagaaaagctggggtatctcccacctcatgccccacaacaagacaaggcttcctccccgggttccctcctgcagtgggtggggccatcccagcttttcttacagcatcatatcattaaagcaaaaaaaaagaaaaaaaaaagaaaaaaccacaaccctaaagtgtttcatgtgactccgtgagggctgccagagagctaagagcttcttaagcagcttccttccaagccatttgggccccttctataaataaagctttagacaattttgcaaaaggatatttatttacctgatagatcataacagctcctgctcctgcggtgtctttagccctgttgggtgatctttgagcacttagctccctctcacctagttaggcctctttttggacagcaaaagaaaaaaataatatagagttgagctccttggaggagcaggcacctgacgtggggtggtcctcctcgccgtgggctcactctgatccaagccattaacacagaggcggcagcaaatgccaaggggaaattattaataagcaatgtctggaagactccaagccagcacgaacatttctaaagtggcaaagggaagaggcgggaatggggggaggagggaaccaccgttgcacatttctcagaagagcaggaccaagaggaaaacagaagagaacaacccgaggaagatgaatgattacaagggaagcagttctttccctctctgggtttcacctgcttcgattttgaggtatccctacatgcttttcttgcttcaaattgtgcagaggaagggcttagctcgggcattctcagcactggcactactgatattttgaggccagaccatccttgttggggacagacctgggtatcgtaggatgccttttggcatccctggcctctacctgtgtcatgccaggagcagccccctctcctagtgtgacaactgcagcatctccaggcattgacaagtggcttctggggagaagaatcacccatggttgagaactgctgaaattagacatagagataaaattgaggatcagtgcagaaaaaaatcagaaaggtcaggaaaagaccaagacagtggacctgagttccaatcccagctccgccgcttcccgggtgaccttgattgaatgacttcctatctgggtcttaattttttttttcacttataaaatgggattataattaaccatgccaaccacataagatattggtgagagttgaaacattattcgtgtcctgtcctcagcacaaagcttggggcagaatttaaaaatcaaaaatcacccattattattgtaacaatgtttatcagcgtatgcaaaatagtctctctcacaacctaccacacatgaagggttccaattcctctgaccagtgtgcttccattcatcccaagaagcctttgctgtgtggaggccgattagcaattacctcccaccccccttaaagttatattccaggaagacctgatgcagagactgaaactatttgcatcagtcatggttggttgtaagtgactggaacccacacttaaacagaagaggagtgccccagaatgctgaggatagctccagatcccagaatcaaaaaagaaggccgtggagcctggcttagcacagggcagaaccagagcaaatctgtgcccctgacagcagagaccaatccatgccactgttggagtatgatctctggaattagttagtgccagtcttttttttcttctttgttctcacatctctctgctcaagattcacagtcccaggaggcatctgggtgcggtggctcacacttttaatcccagcactttgggaacccaagatgggaggatcacttgaggccaggagttcaagaacagcctgggcaacagagcaagactctatctttacaaaagattaaaaaattagccaggcatggtggcatgtgatagctactcaggaagctaaggcaagagggttccttgagcccaggagtttgaggctacagtgagctgtcattgcactgttgcactccagcctgggtgacagagcaagagcctgcctcgaaaaaaaaaaaaaaaaaaatcccaggagagaatgtgattgactacctggagtctcatgctcaaccctgacctgggtgagtagcaggcactttgattgacaggtcttctaagccctacctcaggaggaagggggagggtcatttctaataggaaattggagtgctgttatcccaaaaaagaaacagaacatggagagctgataaaagcaacactcactcaccacacttctgtactttagaatgtacccatttgctctttgctggggcaatagctgtgtgtttctttagcacagagagcagaagcactccacctgttcagtattcactttacacttcatcacgagttcccaaataagacttccagcctttaggctagtctgacatcccaataaaaggagaaggccatagttagagaaaatgcatatgataaagctttcatttcccccggctgagaaggccagggcacactgcgctctccccagaaatgcgacccagcatcattccatcctccacgctcacagacctatgcccttgtgccctctcccgctcccattcctcacttcaccccagagggacacagcctggcttctccactcagccctctcccaaccctatgcatacttgattcacgactccaaatatgagtacgagcttgattacaccacacctggaaagaaggccctggaactaattaatctacagtttccttcacgacacaagcccaccgtggagaggaacaggagtgaacatggcctccaggaggctgcaactctacactaagccaggagacactgaggactgccagggtgggagctatcgatttgtcaatacgcaaaacacaaccggagagtcattttttctgctgaggttaccatttatcccggaagatgctcttggcattaaagcatggcatgaaagcttcccttagatggcaggataagggaaatgttagacacccagagagagtaacttggcacctgagatttattaatattttaaatgtggaaggcatacattccagggcttactcattgcttctggggaaggatccaggtaaacaaatccacaacatcgctagaaacaaaaactccacctttccatcctgttcctgcatgggaaaatgaggatgagctaattattcagatataagtagtatctttaggataaaaggatcgaaggccttcgctgttatatctggggtttctccatcataccatcctgggagaacaaattgaaattataattttattaatgacactcggaagagtggatcaatttttccatgaactcagaacttggcaatgaagagaccatactggatcatttgaggtcaggagttcgagacgagcctggccaacatgatgaaaccacgtccctactaaaaatacaaaaaattagctgggtatggtggcacccatctgcagtctcagctactcaggaggctggggcaggagaatcacttgaacccagaaggcagaggttgcagtgagccaagtcactgcactccagcctgggtgacagagggagaccccgtctcaaaaaaaaaaaaaaagtaaacttgggtcaatctgttccccacctagggccttttctacttggatgaatctgaaagaaaaataaaaatgaaaatcagaggtcattttatgggcagattccagcaccaggattccctgtgatttgttcaaagaaacctgctcctttccacgtgtcccttacaaaaagggctcttcctgcttggaccccctgcactagtcaatccaggtgacatgaacagaagtcatttaaggctgtggcttcagactccaccagtttctccagtctcctaatgagaactgaagagaagagtcatgagaactgaaagaagagagaaagaaaaatccatcaaaacttcatttagccaaaggagcaaaaactcaggcacaaaaccggtcagttaaataatcagtttgccttgcctttttgttgttgttgttagtttgtttttaactgattttttttaatctgcctttagcagaaccattagattctggccaggagtggtggcttacacctgtaatcctagcactttaggaggccaaggcagatggatcacttgagcctaggagttcgagaccagcctagacaaaatggtgaaacctcatctctgcaataaagaaacatgcacaagttatgttcattgcagcactatccacaatagcaaagatatggaatcaacccaaatgctcatcaacgatagactggataaagaaaatgtggtacatatacaccatggaatactatgcagccatacaaaggaatgagatcatgtcctttgcaaggacatgggtggagcaggaagccattatcctcagcaaactaacacagaaacagaaaaccaaacaccacacatttttacttatgagtgggagttgaacaatgagaacacatggacacagggaggggaacaacacacactggggcctgttgggggagctgggggagggagagcatcaggataaatagctaatgcatgctgggcttgatacctaggtgatgggttgataggtgcagcaaaccaccatggcacacgtttacctacgtaacaaacctgcatgacctgcacatgtaccctgtacttaaaattaaattaaattttaaaagaatacaaaaagtaactggacatggtggtatgcacctgcagtcccagctactcaggaggctgaggagggaggatcacctgggcctggggaggttaaaacttcaatgagtcctggtcatgccactgcactccagcctgggtgacagagcaagatcctattccttaaaaaaaagaatagaaaaagaaaaaaaattcttacaggcttccaaagaagatctgctgccagaccgtcagctaaaagcaggtgccttattaaggataataggctaaagagaacctctaacactgtatttcataattagactttgcattcttttcatattatagcacttcagtaaaggataagacctcaaaatagtatactttcattgttccccttttggactttatgctatgattgtcatacactttatttttacctagattataaatgctggagtctattaccacttttatttaaacagacaattatcttttagagagagttaactaacaagaaaaatattctctacatttccccttatagttacagtggagctcttcactttctgtctagatccatatatgatggaaatatggatcttgactttgcatttttgacatacttcccagacagactttataatttgacctagagattaggcctgggtcacagagccccccggctgtttctctgccctgcagctctctctgagggtgctcccgcctgccagaaagcccaggttggaaaggcgtcttctcagaagacttctccaatcctttctgcacccatgctccctctccaggcatggtgctccctcttggtatccgcccacactttggatgggcctctcattgctcttttcattgtcaatgccacgtagacacctgcttaccctactgggctgccagcttctgtgtgctggagctcatgaggtatccatctccaatacctggccccgaaggtgtttatgttttttgttgttatttatttatttatttttgagaggagtctcactctgtcacccaacctggagtgcaatgacgtgatctcagctcactgcaacctctgccttcctggttcaagcaattatcctgcctcagcctcccaagtagctggaactacaggcacccaccaccacacccaactaatttttgtatttttagtggagacggagttttcccatgtcagccagactggtctcgaactcctgacctcaggtaattcacctgcctaggccttcccaaggtgttgggattacaggcatgagccactgcgcctggccatgaagaaaggtattttcaggtttgctttctaaacagtctctagcaaatcactctccatggttactgtggcgcatatttgcctttcttcttgaaacatcctttccaagtttaaggcattcttctcaaagagatgccagcaactcactttaccaacataacttgcagctcgagtgtggacttgtgacctagatcctgtattcaggcaccataaaacttcactctaaggaggcaaagacacagccctgtacagagtctaatctggtgggctgactgcagatacttctcacttctagacacagtggtggcagtcatgccttattctggaaactgctgctgtaagacagggatatcttatcaacatgtcagtcgcaagaattgattgaacttgtcttttttaaaaaaaaattttatttccataagtttttgggggaacaggtggtatttggttacatgagtaagttctttagtggtgatttgtaagattttgctgcacccatcacccaagcagtgcacactgaacccaatttgtagtcttttatccctcaccccccgccacaccctttccctgagtccctaaagtccattgcatcgttcttatgcccttgcatcttcacaccttagctcccacttgtaagtgagagcatacgatttttggttttcctttcctgagttgcttcacttagaataatagtctccagttccagccaggttgttgtgaatgccattaattcattcctttttatggctgagtagtattccactatatatatatatatatatatatatatatatatatatatatatatatatatatatatatatatattctgacacttatcaggtgccctataaacatacaataggagtggcaaatagcagcttgaaaaccaaatctagcctgactgtgcactccctctggtgacccagtgcctttatctatctatctatctatctatctatctatctatctatatgtatatatatatgccacaatttctttatccactcattgatgtatgggcatttaggctggctccagatttttgcaattgtgaattgtgctgccataaatatgcgtgtgcaagtatctttttttaaatggacaaagaatcatttttgtttacataaaatattcaacataaaaattattttttatttatttaaattttttaaagatcaagaaaaataactaatgggtactaggctcagtacctggaggtgtttgttatcaagtaaatggattaagctgcttggtgtgaacacaagggaaaaagcccaggcctacaagagaaaaagcattaggggacctttccactgttatcacaggtgggcccggctgatggtgggaatgtgtgggaagccaggagactccagccagggcagctgggaggggcactgcactgtagacccaggaaattggagacaggtcttggttaatttagaaagtttattttgccgaggttgaggacgtgcgcccgtatattgatgttaatgctggagaggtagagtgaggcctgtccaatcccacttccctttatggcctgaaccagtctttcaggttaaattttaagagccctggctgaggaggaagtccatttagatggttgggggggccttagaattttatttttggtttacaccacagataggtctaggccatctcataggatcctgcagcaggttcaccttgggtctagaactgattcagacttttccaggagtctcctcactagctctgatgctaccacttcccagggccctcttcataaggacctgggtattcagagggagctataaatcagctccaagacagagaggaagaatgaatggcaatcaaggaaggcttccctgagtaggggcagagcttgtgggcaccatgttcccaaggcacacacctagaaagcgcacatacctctagagtgtgcacccacctctccagcgggccctctccagggcaaatgcacctcccttgtctcccatgtctgacacttaccaggtgccctataaacatacaatagcagtggcaaacagcagcttgaaagccaaatctagcctgactgtgcactccctctggtaacccagtgcctttatcaattacctttgactgcctcaagatcaggcagcccctctccagtcccccagagtccttgccactcccttgtcttgcttattttttcacattacatgaatagccctgctaggcatttagattcaccacctttggaataagctaaggaaagcaaaaatgggattctgataaaaagaaatgaatataggggccatgcagatggtaggaaagcaagagtaaaaggatggatataggggccctgcccagtgtgttagtgaatgatgagaagtcagccactgctgctatgcagaaagaaggtagtgaagcaggaggggagagcctgattataaacagaggcaggaagggagatgcactccgcagccagaaccctggaaatcggaccttgacccagtgttccccaaaaccatcattctcacttcgtcttggcaatttttgccatatctgcataccatctgttcaaaacttactttttaaaatgtttgcctaacttaaaaaaaattaaacctcatcctaaacaatgctcaacatcaaattcatgagttttatgtactagttttgtttcttctaatacacattaaaatacaaacattaccaagaaaagtctctgatattatttaaaattatttaaccactgtttcaggcccccaggttccacactgagaatcctttcttagtgtgtcttttgtctaaaagcaagattgagacaaaacctttcacttgaatgtagccactatttttttgttttttggcaaacaaataagcatcaacgaaacaggatgccttttcatagtttttcaggtttgggacttattagaataaggctaataaatctaatagaatcagtctattccattagaataatagggtcccctttgacatttcatctcaaaatcccaatgagtctccaattgtgttcgtctttctcaatctattccctcatctcccttcgtcttctaaccactctccactgacctggacaccacgagtggggtgggccagtgtcaccagagagtcaacctgtcaacaactgaacttgttatgagttgactctgggtccagactactgcattcaaaagccatttcacacctaacacctgtgtgttcacaagcacattgctgaccttctttgtgcctcagttttgttatctgtaaaatggggatgtaaacactacctatctgataaagtcattggtgaaattgacaagttagtgcatggaaacactttgctatgttgtaaatgtctcccaaagttcttgggttgggaactctatccccaaggcaacagtgttgagaggtagaacctttaagaagtaattaggtcacttcttaatggattaatggcctgactcatgggagtgggttattgaaagagagggtttctgataagaggatgagtatggtccccttcctctctctctctcaccctcccactttctgccatgggatgacacagcaagaaggctctcaaaagattccggtaccttgatattggacatcccagcctccagaaacatgagaaataaatgtctttcctttataaattatcgagactgtggtattcaattacggcaacacaaaataggctaaggtacacctagaacagtagctggcactcatgagccaccatgctggcctgtaccagcttttgacaaattgcatcttcctggacctccctcccatcaatccagcttgatctgctgtggaacatccaacatttctctgtatcctggcagctcaagaacagttttctcacaggcttccaagtcatgccatatttggcttcaagcaatcctgttggctggatcccccaatgtctccacacattgtccctgggtcatatcttcccaccctagctgggtgttccgagaccacctgggtgcattcccagagagagaccctccctgtcctattcacatttcacagctttaacccagttaaagccctgccttttcttgggggccttccctgatcacctctttcagagttatatggctgagtgccctgtttaagtcacagatgttctcatggctgtccatagggcccagggagttgtcgtgaaaataggactcacttataccgtatcccctgtggtctgaggggtgagcaaatgacccagctaaaccactcacagttagtcctttggaaggccatattgattggtccaagtaggtcagctgagccaatcaatcagagtccttctggagaccacagtgattggtccaaggaatcagctgagccagtcagagttattcctaaggaacttctgactggagttggtgggaaaagcttctttcctctggcaaggcaagctcagaagacctgggatgaggtgtcagccttgtagagaagcgaatgctgagggaagtgagtcagggaggtaaagacagaaagtcctgagagtattgagtctcagactccagattccctgccccgtctgtgatttaacatgaaaacaagcccagaatcctgacagtgaataaacaccctgcctttttgttaaagctatccagaattggtttatatttctggaaagtaaagaaactgtaataggctgtgcttcccaggctagcctttgttatgtgtgtatattttttaatttagttgttcacatgtttaagtcatccctgtctatatgagagagaggaacatatcccatgcttccttcatttctctccctacacttggcacaatcttgggcacaaaatagatgctcactaaatacgtaggcccacagaggatgctagaattggctggtaggcccagctgcaaacaggaaaattctggatcacctagagtcagcctacaagagtgcccatcacaaatgtgcaggaatcgagtcacagagaattatggttttctcagtaaaggttgcttaaaacaaaagcccattcatctgcctgcagaagacatttaatcaatttacatgagggatttcaaaattagtcagactgtaatgaactatgaaatactgattaatgcatttttgcaatgtttgattagaaacttaacatgtatgcgagcacatctttaccattacagcatttctatgttaatatttggttcttaaccatcggcagaatagatattctgaattacagaaccaaagtgtatttgtggtgaacaatatatgcacagttttcctgctggaaagtgcttcttgatgttcaggaggtgtctcacatttgagggggtgagtgggaggaagtagttcatgggatgcagtcattatgaagttgagtatgagctgctaaattatttgagagttctccagaaaccactagggtaaaagaggccagccatgtctcccaccccagccctccgctaacaacaaggcattctctgaaagaggaaacaatcccaattttactaaggcagaagaagccaaattcttttggccagaatttaaatataccacctcagtcaaaaatgtttgttaggttcctcctcaggacaagcaaattattaattgaaacgcttgaaaatcttcttgaacctatagaggccacagttttaacacagttttaacgttctttccttctttctctctttctttctttttctgtctttctttttttttttttttttttttttttttgagacggagtctcgctctgtcacccaggctggagtgcagtggcgcaatctcggctcactgccagctccgcctcccgggttcacgccattctcctgcctcagcctcccgagcagctgggactgcaggtgcccgccaccacgcctggttaattttttttgtacttttagtagagacggggtttcactgtgttagccaggatggtcttgatttcctgaccttgtgatccgcctgtctcggcctcccaaagtgctgggattataggcatgagccaccacgcccggccctttcttctttctttctttctttctttcttccttttctttccttcctttctttctttctttccttactttctttctttctttctttctctttcctttcttctttcttccatccctccctcccttcctccctccctctctcccttccttccttccttccttctttccttccttccttccttccttctttctttgagatggggtctcactgtcttgcccagtctggagtgcagcagcataatctcttggcttactgcaacttccacctccaagactcaagccattcttccacctcagcctcccaagtagctgggactacaggtgtgcaccgccaaacctggctaattttttctatttttggtagagacagggtttcaccatgttgcccaggctggtcttgaactcctgggctcaagtgatctgcctgccttgacctcccaaagtgctgggattacaggcatgagccaccgctcccagcccacacttttaaatttctgaggacacctccaaagatttttgtgtctgtgtatttcacagagaaggcaagttagtctctttcgtataactggaatgccctttctcctggcaagatcaacagaactccaaacatcaggtgatgctggaagtcataaaaagggaaacatgctgaattgcaaaaatccaatcaactagaagtatgatcttcttaaagttacttaaatcttatttgcacacatgcggaaaacatctaaagaggtggattgacatttttaaaaaagatgtgttaaaaattagctattaaagaatttgaagataaattcccacagtaggtttctaagagcactgatatgctgagcctggccccagccataagattatctgacaaagcccaggcatggtggctcacgcctgtaatcccagcactttggaaggccgaagcgggcggatcaaaaccagcatggccaacatggtgaaaccccatcttaactaaaatacaaaaattagccaggcgtggtggtgcacacctgtaatcccacctacttgggaggctgaggcaggagaatcacttgaacccgggaggtggaggttgcagtgagctgagatcgccccactgctctccagcctggttgacagaactggactctgtctcaaaagaaaaaagattacctgacaaacactggtttcaaaaggtgctcctgtggaaatccaatcaccatagagtgtgctaactccagaacagcaatatacaaatttgttcacatacagaagaagaggtcacatatgtgagtgcacgcgtgggtacacacagagaaacatacttcatgattcttacaagtgcaggcaattatctcacatttagattttaagcctcccttagaattttaaaaatcattattttgcaggatcgccattattctgattcattagcaaggcatacttatgagggtcttaaaataaccaggatgctggacatgtaaaaacatgcttcttgctgtcatgacaactaaataacaacaataatgctcacatccgaatgactacagggaacaaagttattgtgcctgaatatagataagttaattatggaatcatcaaaagaacagcagctctgtcaatgcaaagatgattccaaaataatcaataacaacaatcttgtttggtaattggctatttgtttccaatatgggctctacctttggtctgcgtggaaatgcagcaggctctttagccagcagaagagaaaaaaaaaaaaaaggaaaatctttcagtttagggttggtggttgtcagtagcaacaaataatggaaaattgccatctggcttctttgtttaaatgagatttgaataatcaatttaataatggatagagcacttgcttacagaagtaatccattgtcattgctcagaaaaaataaaaactttgtcaccagagacaaagctctgcggtgtgactataggtaaagcaaataaacgtctacgtacatgccacaatttttattttcactgctgactttacataaactagaggataactcttccttctctatgcttagcttttcacattctgtgtttaataatcaggacaaaatctacagagcagttggcttgctacaggcattcaactccactgatggttagtggagaaagagacacacaaatggtagatttttttagcacattttcccccatcatcatgtgacatattgtggaacaggcctgatttcagcagagcagaggaaataaaaatgcatctggctatggggtgtgtgtgagtgtgagaatgtgtgtgtgtttcctttacacagctgcacagctgcaagaggaaaaatgctattcagaaaggaagaacagggtgacaccagggatcacgatgactcattcatttacatgataaaaatgaagatagcaggaaaggtgttcctaacccgagcagaagcaggagtgatgacatccaaatatggggcttctgtcatgtcgttttgcgtgtgtgtttgtgtgtgtgtttaatgaaacatgcatgtgcagtatcccattggcctcaaaagacccttgaatctttgactaaaaaatttactggtcaggcacagtggctcatgcctgtaatcccagcactttgggaggccaaggtgggtggatcacctgaggtcaggagtttcagaccagcctggccaacatgatgaaacccccgtctctattaaaaacccaaaaattagccaggcgtggtggcaggcgcctgtaatctcagctactcaggaggctgaggcgggagaattgcttgaacctgggaggcagaggttgcattgtgctgagattgtaccagtgcactacagcctgggccacagagtgagacccattctcaaaaaaaaaaaaaaaaaaaattccatgtgatttgaaggagaaaaagggatgaaatccaggccctgtcgcattttggaaagtggcattcaggattcaaacagcaccatctgggctctacggacctacgggactggaaggcgggggcttctcctggcctccactgcttgaagactagagggtattaagggaggatcatcctggtgaatctggccttaggctcctgtttccccagaactcccgatccactcggggcacattccctttcacccggcactggttttctcctcggcctgtgtcactcggaaataccccctgtgaggtttcaggttgtttgcctcttctctgactgaagactcattactgttcacctctgcccctctcccaacccaatccacttcttatttactctcccaggacatccaatgaccaggtccctccccaggtcacagtttcattaacccccttccttcaacagggaagttagatctggttgactctcatcccagagactccctctgggacccaacttggccccagggttaccagcacttccttgacaccaaggcatcccaccatatcacctcatccagtcctgccttgggccacagagccttttataaagtcttagatagtttctcaagtcctctccacatctaggggacaactccattctggcccctcttccagctgggtcttgtgaattccctagacagagccccacagagactgagcacatttttccctgttcttcccaagacccccaccctaattcctggaaaaagcaaagccaggaggcttaacctctttcacttttccccaattatctgagccatcacctgtcacccatactctatataggggtatcttcttgccaggatttccactgcaacatggaaggaagacttgggaaaattgcagacacgtggttatgtgctcatcatcgccaacacattcagtccaaacagaatctcctgcgctaaaaaaaggaggtgttctccaccttgccagcctaatcctgtcctctctcatttctccagaactctaaaggtcccccttaccccagcagcttcaatctcctcctccctacttgttccttctcctgtatcctagtgtgcccagatcaccttgtcttgaaaagaaaaaaaaaaatccctggcctcagtatcctcggtgtcaagcagaccactgaatactcaggtcaggagtccaagaaagacatccgtggttcctatgccctccatggttcagcaaaggacataatttcattcttttttgtggctgcataatattccatagggtcacttccatttctattcttgtttcaaaatcctgaaagctcagaaggcaggttcatccatgtgctagggttgccacaacaaaataccacagatggaggcaggggcttacacagcagaaatttatttctcagagttctagaggctggaagtccaaggtgaatgtgtcagcaaatttggtttcttctgaggcctctctccatggcttgtggatggccgttttctcacggagtcctctgctctgtggctttccctcagtgcttgtgagtctttggtgtctctgtgtgtgaccagctttcctcttcttagaaggacaccagtcagatcggattagagccccactctaagggctttattttaatttactcaccttttaagaggccctatctccaaatacaactgcattctcaagtactgggggttagaggtgaatttgggatggagggtacagttcagcccagaacaccaggtgagaatgtccaagggtgtgcactaagagaggaatgcagagaagcaggtcacatccctggggggccggggttgtcagggtcaggaaagaaaaaggagagagtggatcctaaaggaaaagatcagggtttggagcaggagaggctgatccacagagacgaggactacaggatgggctgaggagtgacagcagagaagaaatcctgagatccagccatctcccctcccttgtacctctgtgaaagggagtggagcaatactggacacaggctggattcctgtggtctgagcagcaaacaggagagagaaaagcagaggccagatgcacatggaagggtgataagctgagtgaaagataagagaggccaggccagcacaatggttcatagctataatcccagcactttgaggaggctgagatgggaagatcctttgaagccagaagctcgagaccagcctgggcaacatggcaagacactgtctctatgaaaattttaaaatgtagccaggcatcgtgatttgtagtcctggctacccagaaggctgagacaggaggatcccgtgagcccaggagtttgaggctgcagtgagccatgattgtgccactgcactccagcctgggtgacagagcgagaccctgtctccagaaaaaataaataaatgaggctgggcgcagtggctcatgcctgtaatcccagaacattgggaggctgaggcagacacatcacttgaggacaggagttcaataccagcctggccaacatggtgaaaccctgtctccactaaaaatacaaaagttagccaagcatggtggtgcgttcctgtaatcccagctactcagatggctgaggtaggaggatcgcttgaacccagtaggtggaggttgcagtgagtagagattatgccactgcactccagcctggacgacagagcaagactctgtctcaaaaaaataagaaaaataaaaataaataaataaaactaagagaggccaatgcagagggtcaggttgaggatactgagagtgaaacagccaagggtaattgtagaagaaacaaaataaagagacaaaacctgtattatttactcaatgtgtacacactgtggctaagaatcaaaaccattagcatacaagaaagcatttagaaattcaaatcaatttatcatcactgtcactgtaatattgacaattattatttatttgttcaccagacatcctatgaacatgttacagttgtcgcttcatgaaaggaccagctctgcctggatttctgctgtgtaatggaagatggaaaaacttcaaacatatttttatgtcctcataatggatgcagttcaagccactgctcctacttagctaatgacttagcagggcaatggaaatacaagcaggtccctgcactttaagtgtggtcatggctcttctcaaattcaaactggcgtttctgtgcaactcttcctggcatatgagctcatggtgctgctggaacacattttcggtgggcacccagggaaccattaatcctagttgccacattcatgtgtatattcaggcttggagcatgtgaactggcttgcttggagtttgaaccaggacatcaattactaacatgtctgagaaattaatcttccgtcagaggataactcctacaggcaaaaacactttggctactgcatgtaaggacaatgttcgtgttctctgttcacatcagaaaagaaacccttattaaaggaggaggaggcctttgttaatggtgctgatactttgtagaccttaggaaaagggtcctctctgccccaagacctccagcttatagaagctgcttatgcaatggtagacccatccactctgcaataatgaacagacagataaagctttgctgggggtaagataactcagattttgctgttcacatgaagacactgtcaacttccaacccttggctccctgagcttcatttggaaatctcaaatcatcactttgtaaacaggaaagacattccctgagaatagggtggttaccagcacctctccccaaaaaaacaaaatgcagaattgtgtgggaaagaaaggcatagcatgctgccattctgcaaggagagggtgattgactcaagatagggtgataaagatcaattgccttggcttggagttatgacaccaacaaagttacaatgacattagcacaaagagagagacacaaatccattacaaagatacaatcaaatattcaaaaaagcctggcatgctccttacttattcatgctaatacaagtatattaagaaatctaaacagtgttagcgctcaatcactcacaaaccaaatgaggttttgcatttatcagactccagtcatcagggcctgtacaaaggtggtaatgtgaaataactggagatatttatatcagcctacatggacggagagatacaccaggatttattaaaatgaggaatgccatcacatttacacagcaataaaagaaataactgtgcagaagtcatttccccagacaataagatttacctttgcaatctcttaaagattttgtatgttttcaaagggtcgctggcagcatttccgaccttaataaactatttacggattaatttcttccacaaaggactggatgcccaaaagtaggttccctcctcgagagccagcaatagactctaaacctttctgtttctgaggatgctgcacacagacacgtgtattccatcttctcagggactgctctttgattaagtgacatgtcctcaattttcaataaagagaagtctattcaggatactgggatgggggtgggtggtgatgtcagtaatgatgtcctagttcaattatccagtgcttgggttttggggaacctgagaggatatttaagaagatccacaagttttacagtgaggagtgcaatgggaagccacagaagatccttgaaaagggattatgctccagcatgagagttgcctcaccagctttgctcttctctacctcccaggagttttctgctcccctggtttctgagaaaatcctcctccccatcttttcttcctccattggtgtctcttcctccctaggttcctaatgttgctgtcaactccatttctttcttttttttttttttccttcgctctgtcactcagggtgaagtgcagtggcacaatcttggctcaatgcaaacctccacctccagggttcaagcgattctcctaccacagcctccggagtagctgggattacaggcacccgccaccatacctggctaattttttgtatttttaatagagatgaggatttcatcatgttggccaggttggtctcgaactcctgaccacaggtgatccacctgttttggcctccaaaagtgctgagattatacgcttgagccaccacaccaggcttttttttttttttgaacaaagatatcttcatctttaataggggtattgctagccagtatgtgcgtgtctgtaatcccagctactccagaggctgagacaggagaatctctcaaatccgccaggcgaaggttgcagtgagccaagatcacgccactgtaatcccacctgggtgacagagtgagactctgtctcaaaaacagaaaacaaagaaacacaaaacaaaaaaccagaacttaaatagggatattgcttttcttgttaaagaacatttactgttacacattttatttcatttgttaataattttttttacatttcattttctattcagaggctacacatgcaggtttgttacaagggtgtattgtgtgatgctgaggtttgaggtccaattgaacttatcacccagatagtgaacgtaagtacccaataggtagttgttcagcccttactctcctttcttcctctccctttggaatctcaggcgtctatttttcccatccttgtgtccatgcacaccctgtgtttaggtctcacttacaagtgaggacatgtgttgttaaattttctgtttctgcattcgtttacttggatatgcaaattgcatccatgctggatttgtatccctgtttctgtaaaggacatgatttcattcttttttgtggctgtgtagtattcattcttttttgtggctgggtagtattccatgggatcactttcatttctattcttgtttcagtctcttctccccatggctggtctcatccatgcccatggcctctagagcacatggcctctggcaccccagtgattctccaaattacaatgtcccagacctctcgctggaatctcagagcttcatatccaattgctcaccacaacaccacccagaagccagacactcagagagcctgagtctgtcttgattcttcttcacctagaacagacagtgagtcacctgcaaggtatcttcatcccctccattccaacctcactggaaatgccctggtacgggccctacacctccttctcattcatgggtgcaatcccagcccatctctccttcccccagagtaatcttgctgaaacatgccttgtacttcattgctgtccctcttaaacggggccatgaatggcctagagagtgaggtccaaacattttcccagtgccacggggcccttcctgctgtcagcaagaatgtgtccttgctgatgttaggcatttgcatgaagcctaagttataaccacactgtaagcacaccctcccaccaagtggcccgtgcactctctttctgtttgcttgcttgcatatctgatgcctgggcagccttcttttgccctctttcagggtcttcctcaaaagcatctcttggggaaacagccagaatcaggcacccctccacctgtgctcctctggccctctgtgtcctccttccaattacttccagggagacagtgggctgctaaccatctggcactcagcctccttcctgcagttcaggcctggaaggattcatgatccacagcagaagctgccctacttgctaggatgtctcttttccctctgtttccctttagtgtgcaatggccaggattgggatcaaagtctaacaaggtcttgctgggcaccaggcagaaggataattctctcccagtaatccatatcataatcagttcaggtcatctcaaggaactacatagaactgtgcttatcactgcaagagacacaggaaaaggagagccagccgctgcctctcagaatctaataggaccatcctaagaagcaatttcaaaggacgtaaaagctggcttgtgccagatgcagtcaaatgccacctgctgaagggtgaagggttgagggcttgggtttcaaattctggtttctttgtgctgatggtgtgtccccacttccggccttagcatcctcacctgaacatgtcctccaggggaagacactagcctgacatcttaagtgttgttagaaggtaaatgccatgtcggctgagacactgtctgtcccattcactggcatatccccaatgtctggcacttagtgggcactcagcaagtatttacaaaggaagaaaagaaggatgaaaggagtaaggaaagaagacagggaagacgaggtggctgtctgccctttcttggttgactccctcatttgtttttcagttttagagacaaggtctctcccactatgttgctcaggctggagtgcagtggtgcaatggtgcaatcactgctcactgcagcctcaacctcccaagctcagaggatccttctgcctcagtctccagagtagctgggactatgggcgtgcaccaccatgcctggctaattttttaatttaatttaatttaatttatgtatttatttatattttgtagaaattaggttttgctttcttgtccagacttgtctctaactcccggccgcaagcagcccttccaccttggcctcccaaatcactgggattacagacatgagccactgcacctggccgactccctcattttgatggagcaagtcttccttagcttctgatacatagaaagtaaattggttaagagcttctatgactgaaaatgtcattattctagcctcatacttgattgatagtttggctaagtagagaattccaagatgaacaatttggaagatgccttctagtttccagtgtttgtgaaaaaatagaactcccccgtctctctctctctctgtctgtctccctctcatttctctttctctcctatgcatgcacacatggaggtacacatcttatagattgtctttctgtttccattattcataaatttctcagtgctgggctttagatgtggacatgtgcctatccattggcctgggcactgaagtcaaaggaagtttcaagggaatcattttctccatgacctcctcccctccggtttctctattctcttcttctggaactcagatctttactcagatctttggtttcctagagcagtcctttaatatttgttattatttatctcctattttacatctttttgtcctttcccccatctttctgagtgatttcctcaagtataacttcgctgcatggggtggggagaaattgggagatctaacagcttcttcaacagactggctaatccctgagccagtggggtattccatggtgtacatttgtggactctcagctttccccactggcttgggagttagtactcttgactaaggtacccaagtcccttactactcacacatttatttcctaccttccaaaattcttctgctgcaatttcatctgctgtttctcctgttcatgtgcctttcagaataggcagtgtctttccagtggggttggagagaagagataaaaacctcactttgttgtctatatatttatttcaattttttttgtttttttgagaaaggtctcactctgtcacccaggctggagtgcagcagtgcaaacatagctcactgcagccttgacctcctgggctccagcaatcctccttccttagcctcttaagtaactgggactacaggtgcttgccaccattcctggataatttattaatgttttgtagagcctgggtttcactatgttgcccaggcttgtctcgaatacttgacctcaagcgatcctcccaccttgacctcccaaatcactgggattacaagtgtgagccatagttcccagctacaaagattgtctataatatatatgctgcaaatattttcttccagtctaaaagttgccttttgcctgtgtttatcatgtcccctctaaatggagctgcttttgatttttatgtagagaaatctgttgctctgtctcttgagtctgaaatcttgcagaagaatttaatcagcagtactttccagtttttgttcttttaggggttcaaggcatcctctggccattagtcattcttaatgaagaaagccagaactctgaaaatgcaccattccctgccctgagtagcttcattccactgggtagtgatcagcccctagtaattcttgggacttccagtggacctgtgtgcttccagctccccagtcagacatgcaagactccattctctaggcagggtgcctgtcaagtcctcaccatgagggcacccatcctcaattcactgcatggacttgcttcttggacactatcctcggcatctccctcccccaagactgcctcattagccgggttattcaaggccgtgttcccacagggcacagctctgcgcaggagcaatgcagaccccaggtgcatacagacacagctctggcttgatgccatttataagcagtgactgataaatccagagctttggatcagataaaacttcgataaatggcctcttcacgtgctggtagcaatacctactcctgtccattctgagtcacctgctgcaattggcttcgttttgtttaatcaacagcacaggcaacaatgcttgaaagtgatcgcactggtgagaaacggtggagatagtcccctaccaaaggggacctgagacagaaaagtacaaaaactcacagccctgttcagaagcccccatgcctgggataatgcagcccatcttcctctatcttggctgtttgaagaggaacaaaggtggcatcctacagtagaccacagaggtcactgggcctgtgcacaaatgcaaggcatcaccccaagcatcccctttgctgggcacgcctcacctgcccttagtccacctgcatctggagcaagtggctcaccagccctggctacttctcagaaggaagtaagccgcctctctccctctcatgtttgtaaaaacacaactctgtcttcaccttgcctacagcatcaggtccacaaagccaccccttcccccaccatgaatcagaatcgcccagataaaggagttgtgttggcctagcagataggcaagcaaattgggcctgtttgcaagggatagagcatttggagagctgaaaacttctctaaagctgtaagaacaccattcagtcctgttcaggccactcagccacacgggacagttccatgcatgtagccccccgctaataaccattccccaccccccacccacccacacctctgcagatcaggactctcaacttggcagcccttgttgctgtccacaagaatgaaaacaaaacaaaaaaacagttttcccaggagggaagctgggtgaagaagacatgaaatgcatagagccttctccttctggcccatgacagacatgaaaacacagatgcaacacaactctggtccaaacatccctgagcctgcacattctatgaatctgtcgcttcctttgtaaaatgaggagaaagtgactcaggcttgagagacagacagtgaaaccagatttcaaagcccagttctgccactgacctgctgtgcaactcagggcaattatttaatataatctacttctctgagcttggttccttatttgtaaaatagagatttacatctcaaggtgtattcatttactcagtcattcagcaaatatttatttgacttgtactgagctccaggcagtgttctaggtgttagcgatggtcgtgaacaaatgaactctgtagggtatggcacagcacacaggtgctaagtaaataatgactgttattactctcactattgctaatgagttttgtcatgagaagcaactggaattaaagtatgttagtgtattttataagtgtaaagctctctgcagacattagctgatattatttcttccatggctcatgctctaagagaaggccaatgggttgctctcggcccctttcagaattgcaagagagctgccaccagttcttgccacatctcctgtctcatgtacacagctatcttagaattcatgctctgaacaggcagcaagagagatcaaactttttctttctccaagtctcaaggtgcctcttttgtcttgcatttctctgatcattggagctttaagcataactaccaggttttcaaattagtcatatttgtctgtgtgcatttgtacacatactaatcagcatcaaacacatctcggtggatagagatagatagatacatagatagatacatagatagacaaatgataggtagataatagacagatgatagatagatagaggttagatagatacatagactgataataaatagatgataggtagatagatgattgatagatagatagatagatagatagatagatagatagatagacagatagatctgtgattgcttacctacaataaaacctctttaaggaaggtccccaggggttgggtgttctacgaaactaagctcaaccatttctgcccccaaatgaggccatgaagagtaggaaaacaaaaggaggggagggccagctggtgctactgattttaacccagcaggctatcaggttgcactagccaaaccctgggttggataagccatggcaagatcaaggttgggctaggataactgtgaatggctcagcagtccctctccataagtagttatttctctctttggagagaagagctttgcttcaggacctctgtccatgtgtgatgaatggttgggaccagaaagacatgcatgtgacaaaaatagagtcagcttgtattcctgcagaaggtcaagtcaagtatatgcctggccctgggcaacaccaaactcaccactgctgattcctacagagtgttctcctgtcctgacatcatggctctcagggccctcccgtgcccagaaactaatcagtatcagacacatctaggagaaattcagggactgcagcctcccttgaaggtggcagagagaaccaaaccctcaacccacccccagtcacaaaggtaaaatcaggatggaaaccaaaagactcatttttgtacttaatttccattgattaaaaaaatatgtaaatgcaaagatgttgacacgattaagccattatgggcttattgcgcaattatttctttgatagttcatgacggctcaattggaggcataatggactattatgcaatgacatctttgctgagttttttgcttgttttcctcttttccttaattttctttctttcatctttcctcctttaaaaaaagagagagagaatttttcatttgcagatcattgactttttaatgtcagattatttactcaatagtcaataacgatgcctttggattcattatgggctatcgtgtaaatagctaattgcattaataacagcctttttacaaatgtttagtttgcagctcatcacacccacggactgtgtaattgctgctatcggggctgatgggcaggcacagccctgggtgcctgcatggtgacagggggacgtctgttgcctttgttctaacctgaccaagttagaaccactaaccacatctgtgcatgcatgtgtgcctgtgtgtgtttatgtagaggggagctatggcatgaacatttgtcagttatttcactttatgtttataaagatgaggagggattcttaggtggctgaaaattttgctttgaaaaccgtcgtgctaatttaaaggaggaaaagtctatgagttggaaagactaacttattaagaggcagtgtgttctgtggggcatttttctttcatagattggagctagtgattttgagagcagattcagatcctggagtgcatacagaacaaatctcccaggatctggccgatgtactcacgaggctcattgtcttcttgtcaacagggctttgtgtttgtgaacagggattctcatatgcatagagcctttgtggaagccatctaatatcttttgcatgtacatttgaggaaaactgaggcagaagataaacacggtcagcactgggtcagctggtgttcacttgtagtggggcaggtggttccttggatcaaagtgatcattttccactccttcacctgcctgttttctgagccccggggccaaccacagcatcttccttcattgtcccagggggctcctttccttccttcttgtacccttcccaagcatctcttcacagccttcactgcttggcatagaccatccctggccaagttttcagtccagatagattgctctgcatgtcaggggttcagcagtatattcaaaattgaaaatataatctcgatcactttttaaagacaattcaggacacctaccagagatcagactgagttagcattttgagtaaagggacacaaaaattgtgctctgcccccaaactgaaaggtcttcctccacaactacagtgaaccccacagtatactgggcaaggggtcttatctgcaagatgtccatccactcatcatccctccccaatacagaacgtacagaagaaccaagaccaatctgcataaaccatttaatccaaagacagcatgcacttggattgcgaacttggattgtgaacagcaccctgttcgcttggtcagtgttgacaaaatgctgaaagtcctcaggcctttgccatttcaactcctagaacttgaacttgtgggctggtgaaataacgcataaatgtctcctgttagctgcacatctctttctccacctttagaatgctttcctctatttgatcacttttcaagtattaatggtaagtcataattccaaaataattttgagagcaaaagaaaataaatacacccagcctaggagataaaaaagagttatgggactagtttagacaagattatgacacttatcattcaactaaaaccataacataataaagaattttacgcattacatggtcctcttttcttaacataaagggataaatggcacacttctcatatctagcaacataaggtactcaaatctattcagatggttctactaaaattgggagaattaggaaaaagaaaagatgcttactaactggaaaagttcatgcatttttaaagttttattttacatatgcaggtttgttacatgggtatattgcccccaggtagtgagcatagtacccagtgggtagttttttaacccacaccccctcctccctctcccctctagtagtccccagcatctattgtccctatgtttatgtccatgtatgctcaatccttagctcccacttgtaagtgagaacacatggtattttttctgttcctgcattaattagcgtaggattctggcctccagctccatccaagttgctgtaaaggacatgattttgctttttaatggctgcatagtattccattgtgtacatgtaccacattttcttaatcgagtccaccattgatggccacctaggtggatttcatgtctttgctgttgtgaataatgtggggatgaacatacatgtgcatgtgtctttttggtacaatgatttgttttcttttggatatatacccagcattgagattcctgggttgaatggtagttctgttctaagttcttgagaaatcacaaaactgctttccacagtggttgaactaatctacattcccaccaaaaatgtataagcattctctgcaacctcaccaacatctgatgttttttgactttttgataatagccattctgactggtgtgagatggcatctcactatggttttgatttgcatttctctgatgattagtgatgcattatatcatatgcttgttggctgcttatatgtcttcttttggaacatgtctgtttatgtctttcattcattttttaaggggcttatttgttttttagtccagaaatttctgagtcttggttgcaaatgtcagaaaccaatttcaaggtggtttagggtaagtggatttatcaagaacatcctccaggtgccccatagagccaaacagagcagtgggctggatcacaggagccctaggaggcaaagcattcagggctctcacactctcttaccacttcttccccctccctctctctgccaaggtgagagcaccatggtgagggcaccaaggtgagggcaccatggcagccaaacactcccaagattctactgctgaaaagaaagtctctctggatcccaaatccaaaaaattataattgttgagtatccaccactgaacttaacaatggtgccaggagatcattggaatcatagctaatcacccaagaccatttgaatgcagcagagagagtgggggaatgatggaacagattatatgagaaaagggagaaaaattgggataagcagtgaaaacaaaatgtattctctacgtacaggcaggatttcccatggtagtaattatgaccctctttcagttatccatgccttgggcatagctaatgagcagcagctggggtaagcggaagcagagttacagacaatcagcaagcatttgccaaacccttgcaacatggactgtgatatagtttggatgttttgtccccttcaaatctcatgctgaaatgtgacccccacctgatttcaaattatactacagagttatagtaaccaaaacagcatggtactgacataaaaacagacacatagactaatagaacagaacaaagaaccaagaaacaaacaaatccacatgcctagagttaacttattctccacaagatgtcaaaaacatacactggggagactcagtctcttcaataaatagtgcagggaaaactggggatctgtatgcagaagaatgaaactagacccctatctcctgccacataaaaaaatcaactcaaaattggttaaacacttaaattaaacattggagacactcttcaggacattggtctgggcaaaaatttcttgagagtacttgagagtactaataagccacaaacacaggcaaccaaagcaaaaatggacaaatgggatcacatcaagttaaaaagcttccgcacagcaaaggtaacaatcaacaaagtgaagagacaactcacggaatggaagaaagtatttgcaaactacctatctaatgagggattaataaccagaacatacaaggaactcaaacaactctacgagagaaaaatctaataatctgatcaaaaatgggcaaaagtacatacaaatggcaaactggtatgtgaaaaagtgctcaacctcattcattatcagagaaatgcaaatcaaaactacaatgagatatcatctcacccccgttaaaatggctttcatccaaatgacaggcaataacaaatgcttgtgaagatgtggagaaagggggaacccttatacactctaatgcaaattagtacaaatactatggagaagagtttggaggttcctcaaaaatctaaaaatagagctatcatatgatccagcaaccccactgctatgtatccaaaagaaaggaaatcagtatatcaaagagatgtctgccatctctgttgcagcagcatttacaatagccaagatttggaaataacttaaatgtctatcaatagatgaatggataaagaaaatgtggtacatatacactatagagtactattcagccattaaaaaaaaagaaaatgagatcctgtcatttgcaacaacatggatagaactggagatcactatgttaagtgaaacaagccagacacagaaagataaacattgcatcttatcacttacttgtgggatctaaaagtcaaaacaattgaactaatggaaatagagagtagaagaattgttaccagaggctgggaaagagagtgagggttgttgggggaggtggggatggttaatacatacaaaaaaaatagaaagaatgaataagacctactatttcatagcacaacagggagactatagtcaaaaataatttaattgtacattttaaaataactaaaagagtataattggattgtttacaacaaaaaggataaatagttgaggtgatggataccccatttaccctgatgtggttattaacacattgcatgcctgtatcaaaatatctcaagtaacccattaatatatatacctactatgccatcacaaaaattacacaggaagcggcaaacacttcctgcatgcagaccacctggggtttatggtacagaaagtggatccacctcccaagggtaatgccacatgtcccgtaacatctctgatgaaaaggtaccatctttatatgaatattccagcaagtgctaataatgctattgttcctgtcacttatgacaattccttatataacttcccagaaagatggtctgacctggacctggaattctgggaggttcagagaagcaaatatccttatccaagggatagcacggggaccccaggactctgccttaagacatcagaccatcatctctgccatccataggtctgcgctgggtgcaagtcaccagatccgttatcgggaaaccaaaacggccactttgtgagaatcacccttctccttgagcacccctgccaggtgtgctgggagattcacatggacctcactggaggaaaatccagtactagtcgatcagtggcaagtggacaaggcactcatattacaaaggattcacaccatgaataatttatttcggacttctcttcaataacaagatcccatacatattcttttcttctttgagagagagttccgcttttgctgcccaggctggagtgcagtgctcactgcaacctccgcttcctggtctcaagcaattctcctgcctcagcctctggagtagctgggattacaggtgtgcgccaccatgcccggctattttttgtatttttagcggagacagggtttcaccatgttggtcaggctggtcttgaactcctgacctcaggcaatgcacccgcctcagcctcccaaagtgctgggattacagtcgtgagccaccacgcctggccacagattcttaaatgaatcaatttccaaaagtttgtttcccatatgaagtttcagaaatatgcaaaacatgccatataattagagtccgtagaactctaggaagactggagctggaagtggctgcaggcatatgtaagcccaatgacttttctaactgaagtgtgtagaagtatcacctatgacacctgtcaaaaagacctccatgtgccttccccaggcagtctgattctgaagacctggggcagacccagcaagcctgatcctggacatccatgaatcccactgctggggaaacagaagcaggatagcttcagtgactcctggaatcacacaaagcctggacagacctgggactagaacccagagctctgatgctcaaaatgctgcctctagttcagtaactgcttttctagaatgcctagatgatgaatggcttcaacaactggaatattttatctctaattctgataagcaacaattatttcccagagggtggggcaaatagaatataaggcagaagataaggatgttttataaattggaagagaagcctccagcccctcattaatccactctgctttgctctaaactaaagaggattgcatttccttttttttttactttgaaataatagactgaaagaaaaggttccagaagaaaatccaaatgaacgcccaagccatgttctctcacaaaagaatactgagcaaacttttaatgcagatgatcctggaacaatttaatagctaagtgatccatgatttttcttaacatctatcctcattaaaagagagagagagagagaaagagagggagagaaaaaagaagctgagaaatatctttcaaacccgatgaattcaatgccacttctttttcttttacttaattttccaggtatctcagcatgatctgaataaattatgctgacaataacataatataaatgataaatcatcaacacaattttagtgatatattgcgggaaatgtaaataataaccagggctgctaattggcttgcttcttgggaacaaagctgtgaccgcgtggctgtgccagtcttggctccgtcattaagtatttctgctggtaagttgtttctgctgatctggagaggaaagcgcagcctcgcaggcaaacctttgtgtgaaacttcttctggcaagagcaagggcttaagagagagagaccgtggtgagttgcaggcgatactttctttgttcctccagagtgcctgtgggttgcaagttggcctcgattcccgtgcaaaactgtgttcccctagaagcagcagtaagactgagacaagggaaatctcttcaagtcagttaagttgctgaatctttccaaaaactcttctgactcattttgatttcttcctctctttttttttgctttgataacgatttgattacaacttcatttgaccagaaacataagctgtttctatgtgcttcttattttgaaaataccttgttagcattcatcatatgtttatggagcttaaaaatatattttgtttccttttcccaaacaaacccttctgctttctaacagggttgggcttcttatctacagtgttccctctgtgtcaaacgatgtcttcagaaaaaaaataacctggggtgtagtgggtatattcattcatttactgagcataccagaccagggtttgagtcctgaggggacaccatatgaatcccaggggcaggtttccactcttaggttcttacatcctagtgggagggccaggcagagaaagaagaaacataatacatttaaaaaattgatttgagatcatgttgtttaaaacaatatagagccataagacagagaggagcaggtgtgatagatggttccaggtggcctccacaaggaagtgacattggagttggggcttgggggaccagaaggagctggccatgcaaaggtctagggaaactgtgttccggacagaggggcagcatgtgcaaaggccctgaggctggaacagtctattaagtgtgagggagggaaaaaaaaggcagcaactggggaactggtttctcactgcagcatgatggtaccccaggggaccatttgaaaaaagaggagtttctttctgccacaccaggggtcgctgcacaagacttcacccccatagctcccacttcacatcatacctttcatcagtggggctgtgacttcagagcttccaggaatgccgctcccataaccggtcttctcccagctccttgtgctcgggatttgaatgtgtttcctcctccaacctgctggcttcctaagagtagagtcattctccttaaagattggccagcccatcactgatgtgatctagctcagagtgggtcctggaggccactgccggggactgggcctggagtgtggtttctgtgttcgtagccactgtactattccattcttgtgctgctaataaagacatacgcaagtctgggtaatttctgaagaaaaagaggtttaatggactcacagttccatggggctggggaggcctcacaatcatggtgtaaggtgaaaggcacgtcttacatggtggcaggcaagagacagtgtgtgcaagggaactctcctttattaaaccatcaaatctcgtgagacttattcactatcacaagaacagcacgggaaagacctgcccccatgattcaattacctcccaccgggtccctcccatgacatgtgggaactgtggaagctacaattcagaacgagatttaggtggggactcagccaaactatatcagccactttgggttccagacacaaaagcgcccagccaggagcctctgatgggatgcttcttgctacacccgggccctggcctgctgccccttgtttatcggccagcaaatctggcaactcaccaccctaggagtatgagagcacaatatgtgaggtccctgacccctgaaagtgaagccaccaatgcattccctggagagatcccttaagtggctcacagcagagagcaactgctttgatgaaaagttctgaagactaaagaactgcccctaaatattcctgtctcaaatgagctggcagctctacttccttctaagagttaacttggacactggcctgcaccttagagaaggtcccatgaagtcaaccagcagctgaataagggcagcttttactgtcaaaaattatcaagacagggactgtggccaaacagaagagctgcgggtttagcaactctcttcttgcagccgtcatttctaggcctccatcccaccatcatcaaaaccatttattaagcactccatctgcatagagctcccatttaggcctgggacagagtgagtctgttagacaaaaggtccccatcacagagttatgggcccatcacagacagacagtgatgaggcagactagctaattaaggcaggcattaagccaagaggcagagttacaaagcatttgcactggacacaggcagaagagtccaaaggtcctagtggggaggagaggtggggaaggagggcctcatgcaactctgccatttggatttcaaaggcttccttatccaatgaagagccatgtccattggattcaaagtcaaaggatgatcattattgttttttcatttcagtagcttttggggttcaataggtttttggttacatgaatgaattctatagtactgaattctaagattttagtgcacccacctgtcacccgagtagtgtacattgtacccaatatgtaggtttttaaatccccccacttcccaccctccccctaatctccaaagtccatcatatcactcagtctttgtgttctcatagcttagctcctacttgtaagtgagaacacgcagtgtttggttttccattcctgaattacttcacttagaataatggcctccagctcaatctaagttgctataaaatacattatttagttcctctttatggctgagtaatattccatggtgtatatgtaccacattttctttatctactcattggtcaatgggcacttagactggttccatatctttgcaactgtgagttgtgctgctataaacatgcacgtacaagtgtctttttcatataataacttctattcttttagttacatacccagcagtgggattgctacatcgaatagtagatctacgttttgttctttaaggaatctccatatcgctttccatacaagttgtactaattcacattcccaccagcagtgtaaaagtgttccctttcaccacatccacaccaacgtctattgttttttgactttttagttatgtccattcttataggaaggaggtgatagctcattgtagctgtaattcgcatttccctgataattagtgatgttgaacattttttttcatatgtttaagaaatggctttcctgtccattgcctttgtttgagttccttatagattctagacactagtcttttctcacctgcacagtttgcaaatattttctccccttctgtgggttgtctgtttactctgctgatgatgatgatgatgattattattattattattattattattattattattgtgcagaagcattttaatttaattatgtcccatttatttattttgatttttgttacatttgcttttggggtcatggtcatgaatcctttgcctaggccaatgttcagagagtttttccaatgtcatctttctgaatttttgcggtttcaggtcttagatttaagtctttgatctgttttgagttgatttttgtatgaggtaagatatggggatctagttttattcttctacatgtggcctgtccatttccccagcaccatttattaaataggttgtcttttcctcaatttatggttttgtatgctttgttgaagattagtaaaaaaaaaaaaaaaaaaaaaaattgtgtaccagacttccacttcaggagcaacatggcatagcctcaccctccccttccaatgacctctaaatataactaaatactgtggaatttattcaatagacaatgttagaaggactctaaagactggaaagaagaggatggactacctaggagacttggagcttgaatgccaatgtggtgagttcctcagattttctttgcatcttccatatactactacactaggcttcagaggagcttgcaacccagaactgccaacaagtacacacacacaaacctgcacgcacaaaagggaagccaaggcactgggcatgaggaaagccaacaaagaccatgtgggaaattccaaccctgctgcacaacccaggcccagaacagtggtctgtttgttaagcacagtggcagcaaagcccagtcatgccaacccttgtcttacaaccagggtcctgaagggtagtctgatctgtcctcagtggcaacagcaaagctccaggatagcctagactctactccataaccagacttcagtggacaggccaatctgcaatcagcagccaacagcagcagcagtgaagccccatgtctccctggtctccaaccaggagcatgaggagactcaggcccagcatctcctgcctttcctccccagaaggtcacccagtaacagcagccatcccagagaagcaagcatcttattttttctacatttgacaccatcagaaattgctcaggagccccagcagcacctgaagcatgaaacagactagaacagcatcacagggctcaaaaatctaaactgtcactggaactaaagttcacaaaagtgtgccagaaagtgcacactaaacccaaacagagtgactgcccactgaaatagaagattgaaatatgattattagtgctctgccataataatcaaaatatacaagatacaatctaattcactcctcataccaagaaccagaaaaatcataattagaaagaaacaaggcaatcaactaacacccataccaagttgcatctgatgctgaatttatctgacaaagagtttagaacaaccatggtaaaaatgcttcaacaagcaattacaaattcatatgaaacaaatgaaaaagtggaaaaaaatacaagttgtaaaagccaccaaattgaaattatataactgagaaaaaaatcccaaataaaaaatccattggtaagttcagtagtaaactggagatgacagaggacagaagcaatgaacataaagacagatcaatagaagttactcattcggaacaacagagggacaaatttaacagagcctcagggatctgtgggaaaataaccaaaggtctaatctttatattatcagaatcccagaaggaaaagagacagtgggactgaaaaagtatttgaaagaaataatagttaaaaacttccaaaatttggtaaaaataaataaataaataaataaacctgcagatttttgaagctgggtaagttccagatataaacctgaagaaatccactccaagacacatcacaatactgaaaactaaacacaacaaaaataacattaaagagagaaataatgtattaccaaaggaaaaaaacaccaatttaaatgacaatggatttttttttttatctgaagctatggaggccagaagaaagtagcacaatatttttcaagttttgggaaaaaaaaaaaaaagaagaaaagaactgtcaaccttaaatcctatatccagcaaaagtgccctttaggaataacgaaaaaataatgattttttcagacaaataaaaactaagataatttggagcacacctactgtttgagaaggggtaaggaaagctgtccaaacaaaaagaaaagaacaacagaaaaagaatataatatttgaagaagaaacaatggaatgggcaaaaacagaagtcaacataataagaccatccttcaactcatgagtttctttgtggttaaagcaacagctacaacaccatctaaggtggtgattaaggtatataaaagaaatactttaaaacaattatattttaaaagtggagaggataagggtgcctaaatagaagtaaggtctatatacacttcactttaggtgctaaaacctaaatatcttaccattatgtctatggtaagatttacagtaaccactaagaaaactgtacaaggtgacatattcaaaaatattagaaataaatcaaaatggaactgtgaaaattttgaattaatccacagaaaaggaagaaaaataaaaacagaacaaaaaaataccacaggaacaaatagaaaacaactaataaaaaagcaaacctaaatcttaacatgtcaataattactttatgtgtacatggtccaaacacagctaaaagatagtgatttagcagagtaaacaaaaaatatgacccaatacatgctatctacaagaaactcactttaaatgtgacaactaggtagattgagtgtaaaagaatggaaggaaaaaaatatgcatatatcttggaataaataatcaaaaaatcacaagagtaggtattcagatgaagggactttgaagcaagtgtgtgtgtgtgtgtgtgtgtgtgtgtgtatgacaaaaagaaacatgatgtaatgaatctgcaagaagatataacattcttaattgtgtatgcaccacataacagaacatcaaaatacatgaagcaaaaactgatagacttgaaatgagaaatagaaaaatccacaattatagttagaatttcaacatcccactattggcaactgatagaaatactagatagaaaatgaggcaggatataaaagaactgaacaccatcaaccaacagaatctatttgacatttataaaacattcccccatccagcagcagcagcagaatacatgttcttttcaagcatccttgaaaaatttaccaaggtagactatatcttgagtcatgaaacaaacctcagcaaatttaaaagaattttaaattttaaattcttttaaatcatacagactattttttttaccatgatggaatcaaactagaaattataagagaaaggcaacaggaaaacctccaataattggaaattaaacaatgcatttctaaataatccatggctcaagaggaagtcttattaaaaatacataacacaggccaggcatggtggctcacacctgtaatcccagcacttttggaagccgaggtggtcaaatcacttgagcccaggagttcgagaccagcctggccaacatggtgaaaccctgtctctactaaaaatataaaaattggtcgggcatggtggtgtacacctgtgcacctgtaatcctagctacttgggaggctgaaacatgagaatcacttgaacccaggaggcaaaggatgcaaagagctgagatctttccactgctctccaacctgggtgacagagggagaccccgtctcagaaaaaaaaaaaaagtagaacaaaattaaaataaaaacaaaccatatcaaatttatgagatcaagctaaagtaatagtaagaggaatatttgtattagtaaatatagttgacccctgaacaatatgggggttaggggtactggttccccaacccgtgccatgtagtaaaaaaagtgtgtataatttttgactcccgaaaaacataactactaacagcctgttattgaccagaagccttaccaataatataaacagttgatacacacattttatatgttatatatattatataatgtattcttacaagaaagtatgctagagaaaagaaaacattatcaagaaaatcataaagaagagaaatatatttactatttgttaagaggaagtggatcattgtaaaggtcttcatcctcatcatcttcccattgggtaaactgaaaagaaggagggaaaggaggcattggtcttgctgtctcaggggtggcacaggcaaaagaggtggaggaggtagaaagggagcaagagaggcagaccacactgagtataatcttatggaaatagatcatgatttctgtctgacttctttgcttcttcatttctctaaaaatgtttctatatggtatcaattcttcttctaccatttgctttcatttcattgcccctgtcacaaaagagtccatgttgttaaagaagtcaacagcagtcttaaatacttggaatcctttcatcggactgcctaatgtcaacctgttttctggcactgcttcttctatgtcttcctcataatctggcactggtttggaaacacctactgcaagccttcttctgttaactcctttgatgtggcatctattagttcttgaatttctccaagatctgtatcttggaacccttcatgcttcccccaccattttggccatatccacagtctctttcaagatgtccttgattggctctgtcacatatctggtgaagtcatgcataacatctggacacagttttctccagtagaaatgtattgctttgggctggatggttttcatggctttctataacaatgatggtatcttcatggaatggtataatctttccagactttcatgatgttctctctatcaaggtttctctcttccatagtatgacaatcctttctacagtgtcatgtttaataagctttaaaggtccttatgtcctcctgatctagaggctgaagtagagacattgtgtttgggagcaagtaggatgccttcagtgttgaactcattggggttctgggtggctaggggcatggttcaatttcaaaataattttaaaagacagttcctaactgccaaggtacttcctgactttagagacaaagcatctttggaactaaccccctctactgccccccaccccccaaaaaaaaaagttctcattgtccaggctgtcttgttacaggacaaccaaaagactggtagctggtgtttaccctttcctttcaaggctcaggggttagtagctttatagataagagcagtcctgatcataaatccagtgcattttcataaaacagtaaagttagcctgtcccttcctgccttaaatcctggtgctggggctggcttctcttccttatgaatagatgcttttcaagacttttttaaaaatcagaataaggagcttttgtctgcgttaaaaacctgttcaggcagatatcctttcttctcaatgattttgttaatagttcctggaaactcatctgctgcctcttggtcagcagaaggtgcttctcctgttatctttatattttttaagctaaatctctttctaaaattataacatcatcctttgctggcaataaattctccagctttagattattcgcattccttttgctttaagttgtcacataatgatttcccattttctcgaatcatgttagagtctataggtatgccttttttatagcaatcctgcacccacataaaagctgcattttcaatacaataataaaaagcatttcacaaaaaattaccaggtttttgtgcctactagtatagctgaaaagacagcttcacaagtttccttttctttttttgctatggtcctttgcctggaatcatttatcttgaaatggcagatgactgagcacactggcacatgcctgaagtcccagacacttgggaggctgtggcaggaggactgcttgagcccaagagctcaagtccagcctgggcaacaaagcaagatcccatttcttaaaaaaaaaagaaagaaagaaaaaaaggaaggaaggaagaaaatggtgggcaacagcagctttagacctcaatctatggcacctatcaagcaattaaactttttcttgtaatgtcgtgacttttttctacttcttgggagcacttccagcatcactagtggcacttagaatgggccccagagtgttattcaaggtttaaggtattgcactaaacactatgggaaatagatgagaaccacaagaaatcactttttactgagacacaaactgctcatggggagatgattagcctctcacagcactataagtagatacccttaacactagctcaccacaatagcaacaagaggaggctgctaaattattacaatagtctaacacacgctacaattacattttatgcaggtataatttaatattgcatccttacatttgtttacatttctctcaactatgaaaggtgtctgtgtttatgtatgtaagttctgataaattttaactttttctaacagatgtgtgtatattttatggtagtaagtgataaagtagactagtatttacatatattttatgcatgcataatatactgaactttaaaaaaatgatatttctatctcatacagtttgtgaattttttcaaattgttgcaaattcccaaaaaattttccagtatacttattgaaaaaaaaatccacatataaatcacagttcaaaaccattgttcaagggtaaactgtgcttacattagaaaagagaaaagttttccaatcaataatctaaattcttactttttgaaactagtagaagaacaagataaacctaaggcaagcatacaaaaggaaacaattaaatgaaaagcagaaatcaatgaaaggaaaataagaaaataaaggaaataattagaacgaatagctggttctttttttaaaaaattaataaattgataaatgtctaggcaagctaaccaagaaaaaaaaagagatgacacaaattaccaacatcagaaatgaaataagactcatcactactgttcctacgaagattaaaagaataatttaaaaattctgtgaactattccatactcacaaattttttaacttagatgagatggattgattcttgaaagacacaaattactaaaacttacacaagaagaaacaaataatctaagtaggcctacatttattaaaaaattgaattaatcattaacaaacttccaaaaagagaaagcatcaggcctggatggattcactgataaattctaccaaatatttatggtaaagactatgccagttctctacaatctcttccagaaaatagaagcaagatgcttagtaacaggccagcataacctttgacaaaatccaacacataatcacaagaaaactctcagctagctgggaactgccttaatatgatagagaacatctaccaaaaataaatagcaccatacataacagggaaaaaacagacactttccctataaagttgtcaacaaagcaaagatatcctgtcttgccactcttattcagcaggatacttgaagtcttatccagtgcaataagaaaagaaacagaaataaactttataagactggaaaggaacaagtaaaattgtctttgttcaaagatgacattattatcaatgtagaacatcccaaagaattgatcaaaaactataacaaaacaaagcaaaacaaatctcctggatttaataagtgagtataaaaggttacaggatacaagattaatatacaaaagtcaattgctttcctatataccacaatgaacaattgaaatgtgaaattcaaaaatactatcagtcaggtatggcagcttaagcctgtaatcccatcactttgggaggccaaggcaaaagaattgctggagtccaggaatccaagatcagcctaggaaacatagtgaatacactatctttacaaaaaataaaaataggcatagtgtcacatgctagcagtctcagttgcccaggaggctgaggtgggggaatcacttgagcccgggaggtaaaggctacagtgacccatgattgcatcactgtactcccgtctggggaacagagtgagactctgtctcaaataaataaataaataaatacggtttataatggcacccaaacaatgaaatacttaggaatgaaattaataagatacatatagtatctgtgcagaaaacaataaaactgtgattttaaaaaatcaaagatctaaataaatggaaggatattccatgttcattgactggaagactcaatattgttaaaatgtcagttcttcccaacttgatctatagattcaatgcaatcccaatcaaaattgcaggaagctgtttcacagatagtcacaaactgattctaaagttcatgtggaaaggcaaaatacatacaatggctcatgcaatactgaataaaaacaaagttggaagactcacacaaccaaattttaatacttataataaaggtatggaaatcaagacagtatggtattaatgaaaaagcagacacatagatcaagtgtaatagactaaaaagcccagaaatagagccacaaaatatagtcaacagatctttggcaaaagagcaaaagcaattcaagggaaaagaagtattttcaacaaatggttctgaatcaattggatgtgcatatttaaaaagagaatataaacacataccttacacttttcatcaaaattaattcaaagttgatcataaacctaaatgcaaaatataaaagtataataaacatccagaagaaaacatgagaaaaatctaagtgactttgggtttggcaatgagtgtttagatacaccaaaagtataatccaaacttaatgttatataaaaattaataagttaaattttattaaaacaaaaatttgtaagatacatatagtttctgtgtatagtctgggataaaatatttgcaaaacacatctaatgactttgggtttggcaatgggagttgacaaatgtatttcctattttctcaactataggaaaataactcaactttttttaaaactagtttaaaaatacaaggagaagatctgaacaaaaaactcacaaaagaagaaatacagatagcaaataggtaaatgagaaggtacacaacataatttatcattgaggaattgtaaattaaaacaacaataagatatcactatgtacctattagaatgactaaaatctaaaagcgtgataacatcaaatactgatgaagatacagagcaacagaaactctcattcattgcaacagggaatgcaaaatgggacagccatttgagaagacagcttggccacttcttacaaagcaaaacataaccttagccatacaaaccagcaattgcactcctatgtatctacccaactgactggaaaatgtatctatgcaaaaaactgcatgtgaatgtttataatagctttactcataattaccaaaaactgggaagcaactaagatagtcttcaatatgtaaatggataaacagattgtggtgcattcatacaatggaatatcaatataagtaatgcttaaataagtaagtatatgggaataagagacaaatctgtaagaagaattccaaataatgtacgtagatactctgccctcaaagacagggagagcacaattcctcattccttagagatggattgtgcttagtgacttctttccagcaaagtatactatgataaaatggtggtgggtggggagaatcaataactttatagtggggaaacctgacacccaacttcaacaacgttatgaaagtcagcatcaataacaatagaacatgttgatagtatgtactgttgacatgatgtgatgaaaatggccctctacctctgtggtcttcttccccaaaacccattttaattgtgataaaagctacccaggcaaatcatgataaaaacacagaacaatttccaatagaggagcatttgacaaaattcttgacaaggacttctgcaagctgtcaaggtcatcaaaacaagaaaagcctgagaaacttttatatccaaagaaatcctaaggagacaggatgactacatgtaacatggtattttggatgaaacagaagaaattttataaaacctaagaatatatgaatatagcatgggctttaattaataatactgtatcaatattcatttagtaattataacaaatgtaccatactaatgcaagatgttaatgacagaggaaactgggtattaggtatgtggaaactgtctgtagtatcttctcaatttttctctaaatccaaatttgttgtaaaaaataaatttctttttaaaaaataatagtcatttcacattactccactatgtccaactctccagcagctttcctttggatttagaatcaaattccaactagcttgcagcccttatctgagtgcctttgtgaagccttgtttactacttttcagtcaaactggtgttctttctgttctaccaacactccactctcattagcctttcagggactttgcgtacccacatttccccatatctccttgtttcttttgtccactattataatcctcagatttcaaatagtacctgaaacatagtacatgacaactggttggatggattgatgaggagatggattaatgaacatgactgttccaataacaaaccaatgataattgagtcttatgaccttgaagaagcttatctcactgcaattgtctactgatacattttgaagactcacaaaatactcaactgaatcgaaatattcgtataattttaaaaaattgttttagaagcaaaaatgtccacatgccctacaaatgctactaacctgtgtgtacatccctcttatccttagaccttatactaccttctagtgacttcttaagttaatggtctaatcacttcaaactaacactgaacaattaaggtaaacttacattaactgaatgatgtccactggacctcaatagaatttccaatgtcattttagacacttttcagacaatgtcacttggaattaaaaggaagaagttttacaactatgtagaaaataaaatttataatgatccacagggcatagcttgacctctagcagcttgcagtcaggaacagagacatggacaagaatgaacatccagataattgaacaaaatccaaaccacttcacaggtaacagtcaaggttaaacatatcttatgtatacaagccaacatagacccagtacttactacctgcagtaatttaacacttcttaaaatttcataatctctcttgcagcaaatatcaattttctttttctttttttttttttgagacagagtcttgctctgtttctcaggctggagcacagtggcacatctctgctcactgcaaacttcacctcctggtttcaagtgactctcctgcctcagcctcccaactagctaggaatacaggcgcctgccatcaatccagctaatttttgtatttttaatagagacagggttttgccgtgctggccaggttggtcttgaactcctgacctcaagtgatctgcccgaatcggcctcctaaagtgcaaacatcaattttcaaaattatcttccaaagtgcctcggggttttgtgttatagcttacataaaggtggatctgaggaacataagtaagcaagtcaacttaattggattttaggaggtctcaaccactggattttggaggtctaaccagcaagaaagattttattttgaataattacaggagagataattttctgtgcaaagaaaaagtatggaaaaaataacgaaaatgggaaccactattactctgcccacattaaatgaaaactcagttggtttcttgacatacaagcaagcaaactctaaagaaaactttgcacattagcaggatagtctagattcttgaaggcttaacttctttgcacttcaaaccccagtcttgcatgccaaacatttgatattacatcaacatcaccttgaaagaattctaactctggagacaatcagttaattaaaaaaaacacacaggggcatttttttttcttttttttttagacggagtcttgctctgtcacccaggctggagtgcagtggcacgatctcagctcattgcaagctccgcctcttgggttcatgccattctcctgcctcagcctcccaagtagctgggactacaggtgcctgccaccacacccggctaatttttcctttttttttttttttgtatttttagtagagacggggtttccccatgttagccaggatggtctcaatctcctgacctcgtgaacaacccacctcggcctcccaaagtgctgggattacaggcctgagccaccatgcccagccaggggaatattttttatgtataattattttacatgccgatctcaggaccttgattgtctcttctacatgggaactaccatggatatctaattttttggtataaaggaatacaggaatatacattcttctcaagctcatatggaacattcaccaaaatagactacattcttggccataaaatacacctgaacaaatctaaaagaataaaaataatatattgtctgctctgagatcacaatggaattaatctagaaattaattacagacagatagctggaaaatcccaaaatatttggagattaaaggacacacttctaaataacacattggccaaaaaagaaatctcaagaaaaatttaaaatattttgaattaactaaataaaataatgaactaaataaaagtaaaaccactacatattgaaatatgtggaatgtggaaaaagtgatgcttagagggaaatttatagcattgcatgaatatatttaaaaaaaagaagaaagatctaaaattaattatctaggttcccaccataggaaacaagaaaaaaaaagagaaaattaaattcaaggtaagcagaagaaaataaataatttttaaaaaacagaaagcaatgaaattgataaaaggaaatagaaaaaattaataaaaccaaaaggtggttcttttaaaaaaaatcaataaaatcaatagactgccatccagtgtaactatgaaaaaaagatagaaaaaacaaattatgaacatcagaaatgaaagaggggacatcactacagatccaatggacatcaaaattataataaaggaatggtatgaacaactttatacccataaatttgataacctagattaagtggaccaagtccttgacagacacagttcgctgtgtctgtcacgcaaactcacatgaaaggtaggcaatctgaataggcctatgcctattgccaaaatcgaatcaataaataactttgcaaagcagaaagcatttggtctactggtaaattctaccaaatacttaaggaagtaattacacggattcatttttttttacaatctctttcagaagacactgacagagggaatacagaaggtctctgacttatgtagttttacttaagatttgttgactttatgatgggtttatcagggcattaaattcatttttgacataccatgggtatcagaacacaaccccattgtacatcaaagagcatctgtacttcttaactcattctatgaggccaacattgttctaatacaaaaacctcagagacgttacaagaaaactgcaaaccaatacctctcatgagcatagatgtaaaactcctcaacaaaatactagcaaattgaatttaacaatacgtaaaaagaattatacaccatgaccaggtggaatgtatcccaattatatgaagcttgttcaatatttgagaagcaattaatgtaatccagcttatcaacaacctaaaagaataaaaatattgcataattatatcaatagatacagaaaaggcatttgaaaaaatccaatacccattcatgataaaaagcactcaacaaactaggatagaggggaacttcctcaatatgacaaagcatatttacaaaacacttacagctaatattatagttaatgggagaaaaaaccctcttagtaaaatgagaaacatggcaaggatgtcctctgttaccactgctttttaaggtggtggtagtggaaatgctaactaatgcaataagaaaataaaatttctaaaacgatatgcagattgggaagaaatgaaactctgtttacaagtggtgattgtctgggtataaagtccaaaataactgacaaaaaaataagtaattttagcaaagttgcaagatacaatattgacatacaaaagtcaatcacttttctacataccagcaatgaacaagtggaattgaaactaaaaacataatgccttttacattatcacccactagatgaaacactcaggtataaatgtaacaaaatacataagaaatatgtataaggaaaaccacaaaactctgttggaaaagtcaaagaataattaaatagagatatttcatgtttatggataggaagactcaatattgtcaagatgtcagttctcaacttgacccatggatttaatgcaatcccatcgaaatcccagcaaattattttgcaggtatcaataaataattctgaggtatatgagctgagcatggtggcaaatacctgtagtcccagatactctggaggctgaagtgaaagtattgcttaagcccaggaattcaactccagcctgggcagcatagtgagacctcatctttaaaaaaataaaataaaataataaagtttatacggagaggtcaaagacccaaaataatcagcacagtatgaagaacaaagttggaagaccgtctctaaccaacttcaagttttactgtaaaaccacggtaaacaagataatgtggcattggtgaaagaacagacaaacagctcattagaacaaaatagaaagcccggaaataggcccacataagtatagtcagcagatttttagcaaaggaaaaaaggcaataaaatggaacaaagatagtattttgaacaaatggtgcggaaacaactggacatccacatgcaaaccaaaaaaaaaaaaaaagagtctagacacagaccttacacccttcaaaacaattaactcaaagtacatcacagccccaaatgtaaaatacaaaactatgaaactcctagaaaacagtataagagaaaatccagctaatctagagtttagcaatgactttatagaccaaacaccaaagacacaatccatggaataatgaagcaataagctgaacttcattaaaattaaaaattttagccctatgaaatatgctgtcaagaaagtaaaaagagaagccacagactgggagaaatatttgcaaaagacacatctgataaagaactattattcaaaatatgcaaagaactcttaaaactcaataataagaaaatggctcatttaataaattgtgccaaagaccttaacagacacctcaacaaagaagatatgcagatggaaaataagcatatgaaaaggtgctccatgacatatgacataaggtaaatgcaaattagtacagctgtgatatacactacacacctgttagaatggccaaaatccagaacactgagacattaaatataaggatgtggagctaaaggaactcattcattgcaggtaggaatacaaaatggtacaatcactttggaaggtaatttggtgatttcttacaacactaaacacactcctgccatactatccagcaatcatactccttgatatttacccaaaggagctgaaaacagatacacagaaaaatctgcacacagatatgtatatcaactttattcattcatatgtgccaaaacttagaaaaaatcaagatgttcttcaacagatgaatggaaaaataaactgtggtacatttagacaatgaaatattatttagtgctgaaaatcaatgagctatcaagtcataaaatgagctatcaaaccgtaaaaagacagagaggagtcttaaatgcatattactaaatgagaaaagccaatgtgaaaaggcctcatactgtatgattccaactatatgacattttggaaaaggcaaaagaaggtagacagtaaaaagattagtggctgccaagggttagtgggaaggcatgaacagactgagtgcagaagatttttaggatatgaagctgctctgtacaataccatgatgataaagacgtatcatcataaccggtctgaatctgtataatgtacaacaagagtgagccctaatgtaaactatgaactttgggtgataagtatgtgtaaatgtaggttcatcagttataacaaaaatgccaccttggcaggggttgttaacaatgggggaggctgtgcacatgtggggaccgggttgtatgggaaatctctgtgtttgctgctccattttgctgtgaacctgaaactgctccaaaaataaataaaaataaaatgagattagatagaaatagatgtagataaataattacagacagttacagacacagatagatacaagtacagatagatacagatactggtatagataaagatacagataaaaatacagatacagatagatgatacagatacagatacagatagatacagatatagatacagatacaagtatagatacagatatagatccagatacaagtatagatacagatacagatagatgatacagatacagacagctacaggtacagattgatgatacagatacagatacaaatacagacagatacagatacagatatagatagatacaaatatagatacagatactgatagatgatacaaatagatacagatatatatacagatacagatatagatacagatacagatagatacagatacagatataagtacagatacagatacagatgtagatacagatagatacagatacagatatagatgcagatacagatacagataatgcaaagtgagtttagaaccaacgtctgcaccataagcatattattatgtgactgtgtccacattaaaggaaaagtgtgccctacagaaaacttattgatgccaatgtggctatgatgagttatcaacaaatagaatctatgctgaactatcatattttgccctccaaggccagtgaccagtgccaagttaacctgttaaatcccaaagcagaattatgtgaccagatggaaaattccaattgaacatctgtgttacagaaagaatggggccttccacagcctggctgaagatgcagaataatacttgttagtagtcatatctcaaaatgagaaaagtggctattccctttgtatggagctgtgaatcctgaacttttcttcatcagcaacttcttaaacatctttttcagtgaatctcctgctttggaatactgcatctatgacacaaagcaaagtaacaaataattcattttctcactttttttccttttataggtacataatattttacatatttatggggtaagtgtttgttacacatgtataatgtgtgatgatcaggtcagggtatttggggtatccatggtaagtactcaagtacttatcatgtctattgttgatatcgttttaagtccactcttatagtaactttgaaatatacaaactactgttgctaagtataatcaccctggtctgctatcaaacattagaacttatttatttcatctgactatatatttgtacgcaaactctcctcattccctcactcctactcactcacctcctcttcccagtctctggtagctgttagtctattttctatgtccatgagaacatttttgactcccacatatgagtgagactatgcaatatttgtctttctgtgcctggtttatttcacttaacataatggcctcctccagttccacccatgttgctgcaaataacataatttcattttttatggccgaatagtactccattgtgtgtacataccacatcctctttattcattcatctgctgtggacacttaggttgattccatatcttggctattgtgaatagtgctgcaataaacacgcaagagcaggtctcactttgatatacagatttattttcctttggataaatccccagtggtcgattgctgtatcttatggtagttctatttttagttttttgagaaatctccatactattttccatagtggttgtactaatttacatttccaccagcagtgtatgacttcccttttctccacttccttgctagcatctattactttttgtctttttagtaatagccatcctgactggtgtgagatgctatatcactgtggttttaatttgcctttccctgaatgattagtagtaatatcgagcattttttcatagacctgttggccattcatacatcttctcttgagacatgtttgttcccttcttttgtccatttttaatgggattatttgttttttcactatggtgttgcttagttccttgtatattctgggtattagtcccctggaggatgtgtagtttgcaaacattttctcccattcaagaggttgtttcttcacttttttgattgtttcttctgctgtgaagctttttagttttatatagtcctatatgtctacttgttttaactcttctttaatctaagacatgtggttgtcaatcagagctgcagattatcctaaaatgaccaccactagctgagttgatagacttcagaacaaaaactaggcccttgatggcctcttcagccttcagatacctcttaagaaaattcgttgttctcctttaaagattttgaagtactgaaaatagttggaggccaggcatggtggctcacgactataatctcaaaactttgggaggccgaggcaggcaaatctcctgaggtcaggagttcaagaccagcctggctgatatggtgaaaccctgtctccactaaaagtacaaaaattagccaggcatgctggtggacatctgtagtcccagctacttgggaggctgaggcaggaggatcacttgaacccgggaggcagaggttgcagtgagccaagatcacaccactgcactccagcctgggggatagggcaagactccgtccccccaaaaaaaaaaagttggaaaaattcccatccgtatttttaaagttctctatgagtttgaagatgtccaggttaagaaatattgaaatacttgagtcaagaaagtagaaagagaacctgttatttcagaaggattcagatgttccaaggaaaattgatgcatagtgacacagtctgtccaagatatgggttgactgttacctggattctgggatataatactgtacagttattagttaaccaaaaaaaggcatttatggttgttagcagcaaagaaatatatgatgttgtctccaaatgttactaaagtatcattcaatcccagaagaaaatggaacaatatttataaaattctgaaagaaaaagtaaaacaaaaaattgtcttttagcccatcacaaacaggttgttttattaagaacagattagtataattcagcaaggttggctaagggttttaggacataataacaacgtattgtgtgcttagaaaccactaagagatattttaattgttcttaccacaaaaaaatgataaatatgtgggcaatgcatatgttaattaatttgatttagacatttaataatttatacatgtttcaaaacattatgttgtacacattaaatacatgcaattttgtcaattaaaaataaataagtgagttttaggacgtagtctggttacaataatggaagacagtcatagctgctaaaatagcagctcatctttcctgtagtttttgattgcctaatattcaatctcaagtacatggtaaacatggatccttcttatggagatgaatggaattttttattttagtgaactttccttacataagtttacctcctaagagtttacaacatgatatccaatccattgtttcaactgatgaggaattatagtccaaagtgtactatggagttctgagattttgacttacatggagtagcttatagagcatccgatctcccattgaactagaaaatctagataaaatacacaaagggatgtcttctagaagaatcagaacgttaccaaagcaatcaggattaagaggccatgaccccggaagggagggaagggatgtgaaagttagcccaacattacatctactaattatccccttggaggatttaccaatcctccttggctgcaaagagcaagaggcctgagatggcatatttaatttttccttaatttcacaggctaagaacataaaaattggaattcaggactgtcactctagctaaacataaacagccaagtttccagagagtaggagtcacagacatacatctggcactctgcacctgttttctccttgagacatttactgattccaaagctttgtggggctagagtccctgaagccaagcaaagagaggaagaaaagctgaagggaggttttggctatcttaccatgctaggaatacaaaaattaaagttcagtgctcaccaatgaagcaatacactggtaaatattcaggctttcagctgagatgcctgaaggacaaaccagagatagaatcagccttacaaacagtgaaacccagacaggagtcagctcagttctggattgaatcaaattggtatgtttatactctcactgtcatgtagaagaagataatcactgaaagcttctacaatttttcagagagtatgtctggtataaaatttaaaaattatcaagcacagaaggaaacaaaaccaagtggggggtggctagaaatcatacaaataggaacatcttcatagatttaaggttatcagacattgactaaaataactatggttagcatgttcaggaaaataggcaagatgaagttctcccaagaatactttttaagaataaaatgtaattctagatctgaaaaattttaatggctgaaattgtgtactcaatagaagtgtttagtagcaaattaaacacagctttaaaaaataagtaaattggaaattaaaacaggagccaattcacttaaaatataacagagaggaaaatatatgaaaaatacagaagaaaatgtaaggggaacatgtggtacagtaaaaatgtttaatatactactgattaaagataatgaagagaggaaagagggaaaggggcatgagcaatatttgaagagataatggccagtaataattcaagaaaagaatttgccaacacaacatcataaatgggaaaaagatttccaactgaaaatcaagaaactctgcaaatgttaggcaaataaatatgaagaaactacaactcagaatatgagcgcctaactgctataacaaaaagaaaagtcccttaaaaacatccagaaaagaaaagaagtattaccttaaaagtagcaatggatggactgacagctgacttctgcaaagaaatgatggaagccaggaaaaaatagaaggctatgaacaacaattgagtcaaagaagaaattaaaacataaattttaaaatatcttgagacaaacgaaaatggaaacacaacgtaccaaaacttatgagatgtagcaaaagcagctctaaaaagaaagtttatagcaagaaatgcctataacaaaaagaagactgaatataaatagcttaatatttcacctcaaggaactggaagaaaaagaagctcagaggaaggaaatactaaagatcagagcaaaaataaataagagagactattcaaaaataattcaaaagatcaacagaactgagttgttcttttttgaaaaaaattgataaaccttcagctagactaagggaaaaatgaggactcaaagtcagaactgaaagaggagacattaaaaccaataccacagagatacaaagaattataagattactatggacaattgtacatcaacaaatgagataatctagaatcgagaaaattcttagaaacatgcaatctaccaagactaaatcattaagaaacagaaaatctgaacagaccaatgagtaaggaaattgaaacagtaataaaaagtctcccaacaaagaaaatcccaggaccagatagattcactgctgaattctacaaaacatttaaagaacaactaataccaaactctaccacaaaattaaggaggaagtacttccaaattcattttaaaagtccaggactaccctaataccaaagccaggcaaggacactacaagaaaacaaaattgtaggccaatatccctgatgaccatagatgcaaaaatcttccagaaaatattagcaacctgaattcaacagtgcattagaaggattattcaccattattaagtgggatttattcctgggatacaaagatggttcaacatatgcaaatcaatgaatgtgaaatagcccattaacagaataaaggacaaaatctatgtgattatttcaatagatgcagataactcgtggcaaaattcaacatcattttatggtaaaaattctcaacaaattagttacagaaggaatgaacctcaacacacaaaaaaaggccacatgtcacaagctcacagttcacacaatactcagtggtaaaatttgaaagctttgtctctaagatcaagaataaaacaaagatgcccattctcaccactcctaaccaacatagtactagaaatcctagccagagcaacaggcaaataaaagacatccaaatcagaaaggaaaaagtgaaattgtctctgtttgcagatggtgtaattttatgtacagaaaatgctaaacgtgtgaaaaaattgttaaaactaataaatacagtaaagttgtagaacacaagatcagcatataaaactccataatatttctttataataacaacaaacctattaaaaaattcaaaacaatcctgtttacattagccacaaaaaatttaatagcttgtgaataaattaacctaaggaggtgaaagatctgtatgatgaaaactacaaaacattgataaaatacattgaagaaaacacaaataaatggaaagatatcctgtgttcataaactggaagaaggaatattattgaaatgtgcataacacccaaagcaacctacagattcaatgcaatctctgtcaaaactccaatgacattttttacagaagtagaaagaaatcctaagatgtgaacggaaccacaaagtaccccaaatacccaaagcaatcttgggccaaaaaacaaagctggaagcaacatgctaaatgattttaaaataggatacaaagctatagcaatcaaaacatcatggtactggcattaaaataggcacataaaccaatggaacagaaatgagaggccaagaataaattcacacatttatagatttggtcaacaaatatttatttataaataattgaataaatataaatgtttatattggtcaattgatttgtgacaaaggtgccaagaacacacaatggggaaaggacaaacacttcaataaatggtgttggaacaaattgcatatccacaggcacaaggatgaaatttgactccgatcttgaaaacagctttgcaaagattatgacagtgacagaagtctagcaaggctgactctgtcttgcttctaacaaatgatccagcaaccccactacttggtatagatccaaggtaagtgaaatcagtacgttgaagagatatctgcactcccatgcccattgtgttcattgcagcattatccacaatcactaagatatggaatcaacagaagcatctatcaacagaggaatggataaagaaaatgtgggatatatacacaatggaatagcattcagcctgaaagaagaaaatcctgccatctgtgacaacttggatgaacctggaggacactatgttaagtgaaataagccaggcacagaaagacaaatatagtatgatgtcacttctacatagaatctaaacaagttgaattcatagaagcagaaggtagaatagtggttgccaaggcaagagtgagaaagaaagacaggttgggagataatcaaagtatacagaatttcagttagacaggaattatttcatgacatctattgtgtaacacaataactatagtaaataacaatgtattatatacttgaaagttgctaagagattagattttaagtgttctcaccacaaaaaagcatgtgaaataatgcatatgttatttagcaaaatgtagcaatttcacaatgtatacatatttcaaaacataaatgtacaccataaatatatacaattttgtcaagtaaaaattgaaaaattctagaatgaataataagaaaaatttacactttgattttgaattacaacaaaaaactagtaagtaaaaaagaagatagaaagttaagtataaatgtcagaaagaattatcaaactagactttataaccactgaaaataacttttaagagattgggccactgcacaaagcaggactctgtcaaaaaaaaaaaaaaaaagagtggaaagttggttccacttgtgataaagatagagtaacagaaactgaatttaccttctggccttaaaaattaaaaacaaaacaaaacccaaaatttgtatcaagcaaggtattttagacactggacaacaggcagctcaggacaatgattcccaagtggatacaaacaaatgaggtgacccctacagtagcttaagacaaagattgtcagagtgaatttaaaaatataagccaatacttatctatactctatctcaaagaaccaaactttatataaatgatagccaaggaaaattataaaatattttgaactgaatgaaaatgaaaatcttttgaactaaatagacaatatattaagatgtatgggataccactaaagcaggtattaaaggaaaatttgtagcattacattctagcacaagaaagaagaaatgtctgaaattaataacctaagcttacactctaaaaagctttgaaagctttgtctctaagatcaagcttccactctaaaaagttttgaaaactttgtctctaagatcaagcttccagtctaaaaggttttgaaaactttgtctctaagatcaagcttccactctaagcttaggttattaatttgaggttacttcctggagagtttccaggtcatactgcaagaaagggaaatccaaagagagctcagtgagctccctgagttaaggagacaaaattttcaagttaaaaaaagaggccagaatccacagggcaggatacagaataaaagatttctgcacaaagagagttctggagatctggagagagttctcctcaattcttcatctcagcactgatcagcatatttgtgtgaggaaaatgcacaaagccagggaaaaaccagaaaggatcacgttttaaaataataaagatcacatatagctagaaataattcaccttcacagcagccaaagtggagaagcttcaaaacacacagggctttgggtggagcactcagaaggtattgcctcggtattggagctataggagccctagactaaaggctgctcctgcccagtctaacaaaggttaagagtaaggatatgaaaacagtgattattagtatgttgcatctttcaagaagacaaaacaatgcatgagtatgttaagaagagacatggaagatatttttttagactgaagtagaaaaataagtacactatccaaaacaaaacacagaaaaataaaaagactgaaaaaacttacattgcaatgtggaaaactctaagtggactaatattgggggcccagaaagcataagggcagaaaaatatttgaagacatagtggctgaaacttttccaaatttcatgaaaattgtgaacctgtagattaaatgaattcaacaaaacccaagcacaataggtatgaggagcactataacaagatctaacataatcaagttgcttaaaccagtgataaagagataatcttaaaatcagccagacagcaaaaaatacattatatacagagaaataaatagaatgatagcagttatgctcaaaaagcatgcaaaaataaaatacagaatataaccattaaatatatatgtcagaaaacagtacatctttaaagcactgaaagagaaagtctaacctacagttttatacccagtaaagctcttttggataaataaaggtgaaataaaggtctttcagacaaagacaagctgaaagaacttatcatcagaagactagtatcataagaaatgttaaagagaaaatccttcaggaaaaaaaaactgataccaaatagaaatcagaatctacacaaaggaattaagatgggaagagtatgtatgagggtgaaaattaaaaacttttcaaaagttttgcaaatcttttttagaagataatcgattgtttaaaacaaaataataacaatgtataatggagtttataacataagcaacatgttatcagagtaaaatatattatgacaatagcaaagagacttggaaaggaagaaacagaagtgattgtgtaaggttccttgccataagaaaagtgttataatatcatgtaaggcagagcatgataagttacagatatagtctgtaaaccctaaagcagccacaaaaatagcacaacaaagtgttatagctaataagttaacaaaggagatgaaattgaatcatgatattttcaattactacaaacaaagaaaaagaggagaatgggaagagaacaaagaaactaatagaaaataattatcaagatggtaaatttacacatgactgtattaataatcacattactcataaatggcctaaacactccgattagaaggcagagattgtcagaatagattaaaaatataaaaaatacacatctacactctatctcaaagaatcatacttcatgtaagaaacaaatgggttaaaagttaaatgatggtcaagggaagttataaaatattttgaattgaataaaaatgaaaatcttttgaactgaattaacaatattttaaaatgtgtgggataccactaaagcaagtattagaggaaaatatataacattaaatgctaatacagaaaataagaaatgtctgaagttagtaatctaagctttcaatctaagaaattagagaacaaaacaaaacaaaaacaaattaaaccaaaggcaaagagaagaaaataaataataagtgcagaaataaatggaattaaaaacagaaaaataatccagaaaaaacagaatcaaactggttttttgaagatatcaataaagccaataaacctctagccagatgtactaaggataaaagagggagaaagagagaaagagaaagagaatctcctgtatccggactaagaaggaacatcattacagaccctgcagacataatagtaatcataacaataaagattagcctgtgagtaacctgtgtctgaatccacaaggagctagtcaatagtttagattcctggggcccatcccaatcataatgaataaaaatttcagggctaatcagaagaaaggaacataataataatgataataataatagggtttgacatttttgcaaacactccagatgactgatgcaaagttgagctcaaggtgcactgccttagattaaatagagtcagctagtctccaagattcatgactaggaaaattaaaaaataggtcatgctctactgacttccctgtgaagtctagatctgcactgtctagaaacaacctgtcagataaaggggaagctgatgtgaccaacaatgacatacccatgaatttaagactctctccattttctctttacaagttatgcatgttgaaagtgaagctcaaataggtggcaccatcccaggcacatattccaagaagcaaaagactaaaattgtctgccacaataaaatagaataccacaatgatacattttggtatctgtccacaaaaccttcttcaggttctgcctgattactagatttctaactgtaacataaaccccttttcctggaaaacaattgaaagcaaggaagttaaaacaatattatgtgggacaaaatataagtctgcttgacatcttttaagtaaatcacatacatacgtatttgactctcattagtgacaagtgattcttaaaacttagaaagatgctttagctaatcacgataccctcactgcaagctcacagcagccaaagattggcctatctgctgtgcagagaaggatattctctggtcacagcccactcctcaaaccccaggggttcccagtggcccaggccgaccagcatactggcatgatacagcctattacataccgtttaaataaagatttgcaaggaaaatgaattcatggcaacattcattattgatcattctcaaaactgtctggagaattcccccagagggcttagggaagaaattaaacattgttttcctgaattgtttcctgctgttttcccacttcactggttttgctcccgtaattgtgtgtgatcctatagccacaaattttaatatgcctgaattatttcatacagcttctggatcacatgtcaataatttgggtgtgaataactataataatgatgttaataataatcaccatgatgaggaaagatccttagagttccctgtttactgttatctcttaactctttaattacgttttgtctgacctaaatctactgcatcaaaatctgcaagtaataaattccaagttatttctagtctcacctgcccacccttgaccactgcctctttcctggagctcattccccctttcttccccctactattggtctcttatggttttccttctatttctctgaccttctagatcctcgtcaccatttttatgagttcagaaatttggactttttttttttttgagacagagtcttgctctgttgcccaggctgcagtgcagtggcacaatcttggctcactgcaacctccacctcctgggttcaagcgatgctcctgcctcggcctccctagtagctgggattacaggcatgcgccaccaccccaactaatttttgtatttttagtaaagacagggtttcaccatgttggccagggtagccttgaactcatgacttcaagtgatgtgcccacctcggcctcccaaagtgatggaattacaggcatgagccaccatgcccagcccatttctcagaattctaatcagtgttttctcatgtcatttcaaacactctccttagcctctcacctccttgcctagcttcaaacaacatcagtctacatatccagaattcacatctttgatgcaagactccaggtgtcatgcctccacagctcagttaaccatctgatgtcacctcccactactgtctcatgtgccctatgctcccaaaccaactcctctgctcacggctcagccagctttcccagtgcctttttatacccacagctttgacttcctggtccttcttcctaaaacgctttgaaaaatcatatccagcagtatatcaaaaacagcaaattatccattatgaagtttgtttaattcagggaaagtaagagtggttcaacattagcaaatataattttaatataatttaagatatcaaatatgacaaaggaaccaatatatctattgttgaggaaaaaaaattgaaaacattcaatcgtcattcctgattttttaaatgtatagaatactgaatataaaatgctaacttccttacatgatttaaagaaaaaaacctgtcttgaaccaatcttcattcattatacccaggaataaaacatttgcaacatcccttcaaagggaaaatctttataagaacattcattatcaccaccactatttaatatttctctgaaagttctatctaaagcagtgagacaataaaattatgtacaaaatataaatgtaggaaagaaaaaacaggggttgatatttatatattttatgattatttcccttaaaaaattatctaaaaatctagtagagctaataatataatttaataaggtgtccaaataataaatattaacaatgaatcactttcatgaataaaataatgatcagttagaaaatataaccaacaacctatcagaatgaccaggatcagttggggtaaaaagaaaattccagacagaaatactctatctatctatctatctatctatctatctatctatctatctatctatctatgttacctatgtctgaatccatccacccatccatctgtctgtctatctgtctacctatatacacacagctaacccttgaaaaatgcagtggttagggagaaccctaaccactcaatcaaaatccacttttaacattcaactcccccaaaacttacttaactcctaataccctcattaatctatctatctatccatccatccatccatccatctatccatctatatctatatatctatatccatatctgtatctatgtgtatagatagatatacacacacatatagctgaccctggaacaatgcagaagtcaggggaccaacccctcacacagttgaaaatccacatttaactttcgcctccctgaaaacttaactactgatagcctgttaacccaaagccttaccaataacataaacagtcattattttaacacattgtctagtatctacatatattttacccattcatgacctgcctttttcttgtttttttcaatatttctagagtacatggctcacctgtgggtttctttttcaaattgttgcaaatctcccctaagtttttcattaattattgaaaaaagaatccatatataaacgcatccatgaagttcaaacccatgttgttcaggggtcaattgcatgtgtgtgtgtatgtatatacatatatccatcacatatactcagatataaagatattcatgccaagattatttctctattcatctgaatcatgactataaaatttttttgaaaatacgataaatagtaaaggattttcacaaaagttcttccaataagttggtttgttctgatgagaataaaataacagctttatgttggatgacaagtttaaggccaatgaattatgcactttagaaggatgaatttatgatacgttaattatatatcaatacaaaattttaaaattaaaatactacatgtactacctctaaagaggggactgcttattctcacatggcattctgcttacccatgcatagggcagcacagacatagacacatacagctctacgtatgtgaaccaactcaacacagcttcccaacttggtactggcaataatgagatcttcaccttccatgcaattccccatggtacctggtagaattccactttatacctttatataagaatctcactttataactcatcctttgacatcttatatggccacacgccatgctcattcgtgtgtgaaagtgcacgtggtactatgattttttgtaccccgtagtgccttctttatgcctctccgattctgttttgaggaaacagaagctctgagaaggcaaggggcttgcccgagttcacaagaatagcaacttccagacctgggacttgaacctaggtctctagattgcatgccacggttgacgcagccctatggccccgggcatgcgcttctcttcttcctacatgaaagccctccttacaagccttccttgtaccctatggctccaggatctggccccttcacctccccagagtcagagttaccacggtgcagtggcgcaccagtgggcctccggcaatgctgctcccgcttcccaccttccagtggcacttaccagagacacccagtggtaagaattaactggggaatggccctgcccctgctcaggccagctaaacagaagcatttagagcagcaaaaagggcgctttcgttctgaagaccccgcaggcccttccaacgaggccagtttgggaaggagggcatccccttagtggaccttcacagccacactctcgacattggctccagagaatccatgacggggaaaactcatgaaagcctggacaacagacagagaaatctagccacgtgattctgaacacgaattcaatttccaaagattatttctagggggcgtaagaacctgaggcgcaccccgaggaggccagtagtgagtgatgtcagacttccgaaagttctatgtaaagcaatgagacaataaaagtaagcacaaaatataaatttaagagagaagaaaaaagtgttcattatgtacgtattttatgattgtcttcctaaaaaaaattatctgaacatcaattagggctaattatagaatttaatgaggtggccatataataaacattaaaaattaatcacttttgtgaagtaaagcaatgaccagttagaaaatataaccaacaacataggacgatcaggaggagttagggtaaaaagaaaattccaaacacaaacacactatctatctacccatctgtccgtctgcccatccatccatccatccctccatccgattatctgtctgtccatccatccatccatccatccatccatccctccatccgattatctgtctgtccatccatccatacatacatctatctatctatctatctatctgcccatccatccatccatcatccatccatccatctatccatctatccaaccatccatccatccatctatctatccacccatccatctgtccatctatatattcatctatctatctatctatctatctatctatctatctatctatttatctatatctatctatgcattcgtccatctgttcattcatccatccatccatccatccatccatctatctatctgtctacctatatacacacagctaacccttgaaaaatggagtggtcagggaggacccccctcactcagtcaaaaatccccacttttaactttcgactccccaaaaacttacttaactcctaataccatcattaacaaataaaagcaagcaaatttgaataaggtaacgtttgggggcatatctaactagcaaagatgtcaacagcacccaggattgatgagagcacaggaaatgaacactctgaagggaaataaaagtccaggcaaactttctgcagtggtcccattgttgctctcccaggaatgcgtccttaggaatggtcacatgtgtgcagaactgaatttccaagtccgtctagtgttgcagtatttacagttgcaaaaagccacaaacaatctaggaatctaacagaaggggttaaggcgactaaactagtgggtggattaatagaaaaaaatactgtataaccatttttcttaatgtggacctgtgttcatggactcagaaaaatatccgtaatataaaattaagggagagaagaaggctgtaaacagcacatgcgtgagccctttttgttttaattaaaaattacatatataacatatatgcatatattatattatattatattatattatattatattatattatattatatatatttatgtatttgttcttcttggaaacaaagatgtcaatgaatgaataccaaattactaacaatggttatctttgaatttattttcttttctcttattcattctttctctctctagatttttcttttattttttgagtgtctgtgtttcctttctatgattatttttatatttataaaaatatgtaaatatttttacatatatgtatatcagatgagctttccagaaccttctgccactctcaggaaagagcacgctgaccaacagcgggcgcaggtggaaagtgaaggctcagagcattgctctgagacttgtcctgggaggctcctggtctcctctccagcttcctgctcacagagaggcgaggctggctcaggccccgacggtgacgctgacgacggcgacagggaggtgtgcgaagccgggcgcgagctgtgccagctctcgctaatcctctgcagtatggttcgctgctaatttgtcatggcacatatttgccttatgtctaattagcatcaaattgcaaactgctatttgctaacaatttgttgcatcaatctgcttgaaaatctatagtttagaattggattacaacttatcctgtctatcaaaattctagttcacacatacacaaaataacttccccttcccgccaaaaacgtcgcaatgtttgcagtggcacaaaaggagagcgatgtgtttttttttccccaaaagaaagaagaataactatggggtgtctcattttgaatgtcctggctttggtttcccatggcctgggaaaagagctggaatagtgctcacactcaaaaagggtgctccaggcctttctcagggactttccaggaaagtcaagacataaaaaaggcccagaagcccagtcttctcaagtcccagacatagaactcccaggcaaaattgtgcaaagaacaagcccatacctgctgagggacacaacctcaccccagggttttgcctgcattcgctcacataatgctagcaacctcctaaggaagtaggggttaacatttttcttatttacaaattacgaaactcaagttgaaaggctaaatcactcaaggtcacatgtgtggcaagtggcagcacaataattgaagcccaaccgtgatgtttcattgctaaggtgaccctctaaatatcaaaaaataggcagtaggaataacaatgatataaaaattataaaatgagatataaataaaaataatagaaaatgaatgaaataaaaaggaaataacaattaatcattgcatttcacttgatagtttggccttatggagacatcatctagttggatgttgaagattttggtttggcaacatgccctgtggacagatggaagactccgggcctcacatgctcatagccttctcgtggtctcaaaagctacctcctgtggtccatctagaaggaagaactgagataaactccctcgcagagggacgatgcctatgggttccaaagagagtcaaaaggtgacattgggttgagacatcccttctttcctgtttcttgggcaaggagagacatgtttccaacagatggaagttggagctctattgcagagcacaggcacagaagtcgttacattcttagcccagtagctagttgactaaagatgtgccatccattaaaactcattgacctcacaagtggtgaccaaggggcaagaggctttcatggtgtccactccagctctccttggcacccccaaagaacgactttgctttgaaaaacaattcataaaatcattgttattattattataaatattcaaaacctagctgaacacagtggctcatgcctgtaatcccagcactttgggaggcccaggtaggcagatcactggaggtcaggagttcaagaccagcccggccaacatggtgaaaccccatctctaccaaaaatacaaaaataaaataaaattagccaggcatggtggcacaagcctataatcccacatacttgggtggctgaagcaggagaattgcttgaacctgagaggtggaggttgcagtgagccaagattgcaccacctgcactccagtctgggtgacaaagtgagattccgtctcaaaaaaaaaaaaaaaaaagaaatcaaaacctctccttttgtagcttctcctaataatcctttgggctggaaataaaagatcatctaagagcatcttcaaaaaagacctagagaaatcacaaggaaaatttaaaaagcagttatcttccccacacccacgaacatggtcagtggccatgagtttgatatgcaggactgatattcctgcgaaagatgtttgtggagtacctgccagctgtcacaacctgtgttaggtgctgaggacatggaaaggagtagggtgaaccaagccatcacagaacacaggacgcagaggcatgaggaaactcaaggccctaagacgagttcttgataaggacaaagtctagtgaatgcacgtcagtctagagacagacaaacagagaaggcttcctagaggaaaagatgcctgagctgaaacacaaggacaggtgcatgggatgaaaggatccttccaggctaagtgatgcacatgtgcatgccattccccaggaactgaagcatctgtgagttgcagaggccaccccctggatgagcagtgtcaaggttgagaccagggtccccagactgtcttctgccagttgaggaatcccttccaaagagcagggtcttaggatgcctgtaaaagacatcctttctcatctcccttgagggtaaatcaatctctctgttgagctcactagaggagtcaagcaaaaggaagaaagattctaagccaactcagcaagacacaggaagcaggttaagaagctttcttcacttgtgttcttggaatgactctttcacataataagatgttcagtgagggtttgccccatgccagattcaaatagaaatgatgctaccagcctctgtccagatgcacgtttctctatattttgaatggaaggaggccagacactgcatagatctgtaaccagcaaggaagcaaaccaaaaggtgcccaggaaaaacaaataatccccaaacagttgcctccagaaggaagaagttcatgctaaagaactgtgcttggggcttgtgtgttcaaggccagtcagtggggcagataaaccttcagcctccccccaccacacatagacatacaagctcaggaactaggacaggcagggaacttggggttttgaggcagccagagaggatgatcagaagagctgtccagaggctagacacagtcgtctccccaggacaacagggtcacccttgctcagagcgtgctgtgtaaaatccataccataagacttcctttgccagcacagcagagtgacagcaccagccagcaagcccaagacatggccacactgacctggcatcctagaacacaaagccagtatgtcctttaatcaaagtctgagtaatctctttggattcagtttaagttagcctgttctctcactactataaaggaatacctgagactgggtcatttgtaaagaaaagaggtttaattggctcatggttccagaggctgtacaggaagcatggcgccagcatcagcttagcttctggagaggcctcagaaaccttacagtcatggtggaaggcaaagggggagccaacagttcatgtggccaaagcaggaggaagagagagaggaggcaggtgctacacacttttatttttttccaagatggagtcttgctctgttgcccaggatggagtacagtggcactatctcagctcactgcaacctccgcctcctgatttcaagcaattctcctgcctaagcctcccaagcacctagtattacaggcatgcaccaccaggcccagctaatttttgtatttttagtagagacagcgtttcaccatgttggccaggccggtctcaaactcctgaccttgtgatccacctgccttggcctcccaaagtgctgggattacacttctaaacaaccacatcttgtcatgagagcagcattaggagatggtgttaaaccattagaaaccacccccatgatccaatcaccccccacctggtgccacctccaacattggggatagtgactgaacatgatatttgggtggggacacaaagccaaatcgtatcaggcatccaaaaacagcactccttagaagccagaggtactccagcctgggcaacagggtgagaccccgtctctacaaaaaactaaaatgcattagccaggtggcatggtgcgcacctgtagttccagctacttgggaggctgaggtgggaggatcccttgagccccagagttcgaggctgcagtgagctgtgatcatgcctctgctctccatcctaggcaacagactgagatcctgtctctaaaagaggaagaagaaagccagagatacaagcctttcaatgacccattagcccacctgtaggatccgctatatgcctccagatcccagcagaggactgagaggtggataatctcccggtatttgtgtgtgccacttttgtgtgagcaaagacccaaggttgcaacaacagtaggtgtgtacacaaaaaaggaccaggtccatactggtgcatactctccttatggcattaaaaagggacatgctgaatcctggacagaaaggaagaggccccccagaactgcctccagtagggccagcctgtgttgggggccagcccagcatctctgcgtcccatggcatgccccacagggggaccacctttgtgcctccctgttgccagtaaagcacactgatctttaaccttttcagcaactgcaagacatctctgggacctccacacagctcctgtcaaaatgtcgggctgctaactataaactttattttgatgtcttgcttttcgggaataattaccttgtacctaaaatgttagcctatttactgcttgtgcaaaaagatgacaataaaatcaatgttgcacaattccccaaagtgcatcaaagtcttttgcaatgttaatggactggcaggtctgagaggtgtgagctcatgttggcctgcttgggcccccagctctagcaggagaacagctctctcctcatcaacctgcaagcccttgtctgccaaatgtattcattctagagagttggctcagtccctggggtgagagaatgggtgaaatgggggaggggtgatgagagcagattggcaagtacatgaagtcacaaactgtgtgagctgaaagacgcttgcagggactgacatatccaattccacctcccagaggcagggaagcagtttcagagagcgggagtggatcccctagggccccacagcagataaattgtgatgccagaataagaatctatatctccatttttattagtatttttttagatggcgtctcactctgttgcccaggctagagtgcagtggcctgatctcagctcactgcaacctccacctcccagattcaagtgattctcctgcctcagcctcccaaagtgctgggattataggcatgagccgctgcgcctggccagaatccatatcttctaattcctggtctaaaattatatcatccactctgctctttgggggactgaatgatttttcctccctctggcattccctcctagaacatagaccaagtgatgtcttcaggcaggagggcagctaaacagtgtctactggtcatgtagctaatacaggcaccatgtcctaagaagtttggagaaggcatcataaaaaaataaaaattcagttccatgaagtcatagtgtatgccggtaaattaaaggttctgagaagtcttacaatttgcagcgtgtttcgttttgtttacccagcatttctaaagtgtcttcaaataagttattttggtggggagaggtgcgtaatatcggttggagaatttaatgtggcaaaggcagccttaaatatattcaccagcatcacactggtttttttgatggctgtggagaggcaggccctacaggaacaggtgtgggaaagtctccgtgtagcatagccaggtgaggacaagaaacaaaaagaggattggtgaaaacagactccactatgccatcatctacagcccagggcagccagatgtgtcttcttgtcttgggccattttgcgttgctataaagaaatacctgagggtgggtaatacataaagaaaacgggcttatttggctcacaattctgcaggctgtacaagcatggcacgagcatctgctcagcttctggcgaggaatcttccagtcacggtggaaagaaggcagagggggagaggtgtgtcacacggtgacaaagaaagcaagagagccagactcttttaaacaactagctcgtgtgtgaactaacagaacaagaactcactcattaccatggaaagggcaccaagtcattcatgaggaatccaccccccatgactaaaacacctcccaccaggctccacctccaacattggaggtcacatttcaacatgagattccaaggagacaaacaaccagactttatcacttcttctcctggcatgtgttgggggcatgggtgggctggatagaagccgagtacaggaacacagaggttggaaatttgcaaaaaaaatagctgtagcagagcaccaaccccccgcccccagtctgtccagtctaagatcacatttgactgaacaaggtatcggggaagggaacagtggaaggcagaagatgggacccaaaagtcatttgggagggagcagtgcagtggggctccacccaggcagagctgatcctcaggcagctctgggtatctttgtgaagacgcagaggcccaaggcccaagacgcagaggccctggtgtgactgcagtggtcactggggctacatccattgggccttctgcagcaggcccggtgcaaacggaatgtgctctctctggggactgacttcatgcaatgaggccgatcccttgagaaaatggacaaaccctgtgttgggcagaagtggcatgcctttggcttggttttcatcttccattgcagccttttgtggccgcatcaagagaacaagctggcgaaacaccctctttactggccattttcctttaaccacattcctggacatttttaccctagaagtctgcccacctctttgctgctggctcaccttggtttggggattttcttgcagcctttcccataagctcagcgggccactctctgcagaaatgtaactctgcatctaagacgtaactgttaaaccctaccttttggtttctgtccccaaaaccaatgtattttaatgcagatgccctgcagctcaagggtttttaacaatttttggagggaaaaatgtcacacagcttttgaaaatctgccatgagacctactccctgaattctccattcgtttactcagaaaaactcaattgaatcagggaggcatgattccccattagaggaatcattttttctttcctctggtgggttagatttgtttaggtgttcactgatccctcacttgattaatcaccccagctgccttctccttgctcaccaggtggggcggtgaaacaccagagtggcatgagggtcctgtagtcctgttgccatgtggggacccactgcatctctgggacaaaattccaccatttttcatttgaatttcttcaaagctcccaggtatgagccaattccagcttatttccaaattattgtagacttatctgtgaatatacttcacccccatttcctgcaatctacatgctcagccacacttgaacaaatccctccagtctgccttcctgaaacaggattggatgagggaggctctgggaaaaagcaaagagagagaccacaaaaaccaacaggaagaagaggtggaagaatcaaggaaggtggtgacagtttaatccaagatggtagaaatgggagatgagacggagaagtagaagagagaaggaaaaggcatagtcagagagaaagagaagttttcctgttcctgctcctacagcaggtcccggacccaggcatccatcaccaggcacatgatggaggaactctgtccccttacctatgaccagcagcgatgttttttcagtgattccgcaagagtcaaaaacccaacaaagcgcatcgccggcgctgtaaagggagcatgctgccggtgtctgtgaccactgtatgcaaagcttggcattagtcacagccgggccggctgtgacaggcctgaagtgagggagattaatgcgaggctgggacactttattattgtcattctgttctttcagactctgcctctgactttcaattttgctccagaattaattgtctgctccctgcagtatgactgatggagaaggatatgcggagcccaggcacctggctctggccttgacagtctcaggcccggtgtgggatggattgtgtgcggtcagggcgggggacagacgggcatccctcaaagaaatcggcccaggccacaactgacttcaatcagatgtgaccagagattatcctttgccaagaatcattttggcttgtagggttcccagcaacctgcccattccctgtcatggaccctccctggaacccagagctcagtctgttggtggagccattcctagtctttcaggtttctgattctcttcctttttttctggttctgggcaataaattagcagtgcagtctcctaggtctcagccctcccagatgtaagcatttttgtgagcatgtcaagcacagaatctctgacaatgggaaacgcagtgggattccaaaacgctggtgccattttccagttggcgttgaatacccacctccctcttcctcattactcacccttgccccattttccttcatttcaaaaaaaaaaaaaaatcaaatcatatatttaaacagaaaagtcttccttaatagcaaatcctgaaggaagcctccaacaaaatagcaatgttctctccgctttaggagtttggcacacaagaaatggttgttgactgaataaatgaatgtgtgaaggcatgcaagaatattttcatggataaatgaataagtggagttcctaaaaagaatgaaacatagaaaggcatatcttccttttacaaataaataaaaatcctttccagtcatttttaagccaaattcagctgctaaccatttttctaaactttggtcagcctcattccccattgcagatatgttcatgaaaacctaggtgtaattctttaaaaaaaaataaatggaatcccactttaaatgtttaagaatgcaggggaggagggaaaatgtctttgagaaatacatttccagtgctaatttttatgctctggtctagctgtgtgtgtgattttcaacttggggtctagaggtgacagtttcaatgcatgagatacagatttccctagccctcccaaaacaaagtttcactagaggaagagcttatgttttccaggcacctctccctccaaactggataagattgacacgtgagatgaggaaaaaccaaccaataatagaaagggcaagtgttgatgagctgagaaccatttaaaggctggttttctgtagaactttcaagagttccttctaaatatgctgtctgcctataacctgcaataaattactacagctttaactcatctggtactttcatacgattacggtattatgttaaagggtacagaaatatataatatgctcaactgtctctatagttgataccagagggaaaattaccaccactcagtgaagaagattcaacctcattacattaatgatttatcacaatgggaaaatgtgaaaagtaactagttgcttttatgaaaagaggcagcttttcccactggcaactcctgcaggctctccaagaaggagaatttagaaggagctccagacggtcacactctcccactcccttccaaagctccctctgcaacatgaaggagaaggtgcactggcaaatgttggaatatccttcaaacttgacattaagtattcaaatgttacttaagcaaagtgtgagcaattaaattaatcaatcttcccagccatgtacagaacagatgttcaataaatcctctttgcttacagtgagggggggaagagtccacttttaactgtccttcagcagtgacactgctcaggcgtcctctgccggcctcctgggctaccgtcaggtgcttctgctgcactttcctttattataaataacaacaggccacctggactacctgtgctacctgggagcctcaagtttaatgatccttccaacacagggctctgctcgcgcctgatcccaggtaatggggctgatggaaatggcagtagagtgacggttggcagtgacagatgactgctggccaacttgtgctgctgacaagcggtgaatatgggccaatgttgcagaaaggtcaggataaaagtatttgctcgactttcaaagtttctccagaaaaaaaataagcagatgagccaaaaccacatagacctccaacaagagtgcaaagagctttgcaccagaggggctggcttgttctgggctctagaaaagaaggcagtctccattggaagctgtgggttagatgaggagagaaactcagacactagggagagggagccttgttttctttgcatgaacagttcccagtgaggaacttcacctctgggctgccagggaacattgagggaacgttcagtaaacaattctctccctaacccctcaagatgatcatatagagtctccctgttacatcacccagaccctctaagtatccctctttgccaatactctgctgcagaggcagctaacctccaatttacaaaataataaaatcaatgaatgtgccagattaccaaagatcacaggatttgacctgtccactgtggcttctctaactaaatctaccatcctaaaggagaggactggggaatcccaaagcatggggaaggcactcagccctaatcccacagtgccaaccatcccctggtccacccccagaccaggaccctgcccagccagaagcctctgatcaccacccactgaaacccacaaggccactgtcattcagaagtggaggatacaattcctgccctacagatacataacttcaaccttttgaaggctgcctttccatatatggactttatccacattttaatgaggctttaaaatctccaagattaagctggtattttatgtagaactgcctgctttttatgatatcctgacatgttgtacaacatttggtgactatattgatccttataaattcagcatctatatatattcatgaaaagtaccttttctccccattcgggccacaagatgatccagacacacattttcctgagtggagacaataaaactgcaattgtcatggttttgagcgaacacgatgtttcagtgttttcaaattaaaccccttttaccatctgcttgcaaactcttcagtgaggaaatgacagctcctttctaggtatctgatggtgtaagtgcccctgaagtttctccttcaggtgagcttgttataaatcctgaggggcccggcaagggtttcctcccgtgtgggacattatatatcttcatgccctcatgtttgcccgaccagaggccaaccttctcccatttctttgggccattttatgcttttaatctgaaacaaatgattgcaggggggagaaagagcattatcaccttggcgaaacatcgggaatataaaaaagaaaaagaagaagaagaggaagaaagaaagagactatgggcaaattcatcttctgccgctacaatcaatctctcacctaaagaaatacacaataactaggcaggaaagaggcaagatttatgacttagaaacatctacactgaccagcatatacctagtcttcttggctctctccctacccgaatggctctctttaacagttacaatgataaactgtctctccctactgttttacaagtacattagctttatttaatgagatctcagagtaatttaacagatgtatataggacataagactagggaaactcttgctactaggatacttttgccaaggtattctaggacagctaatctgagagatagctttatattctttgagaaagcattgtttggaaggcttttaaaaatgattttaatggaaatattatattacaatcaatgaggagagagcctctttcacattcacttgcattcggcccatgaaaacgcaggatgaatgggctttgtgaagtcgtaggaactcacttacatattgaactgtcaggaaggatgtcaccatcagaaattaatacttgtgttaaaaaagttaatatttcacccacccaccttccaaaaagagtaagaagatacctgggtgtgaggaaacggagagagggtaggcaaagggagagaggaagagactatttgagaaggaggtgaggcacctgtttcagccaatgtcgtgtttcggggctggggtcgagggttggagacaggtgcagtttcctccctaccctctatccctctgtgcctggcgtgctcaggccaggacctccccttcctggctggctgccttcttccttccctgacattccttaacacttggttctctgagaactgtaatggagaaatgacaatggtattaacttttcaaaaattgctttaataaactgccaattaataagtgagaagaggaagccatgggaaattacctggtcatgcttaaaataaaattaaagggggaaggggacgtttttcctcttcctttctcagaaagcacaaggcttgggctctcataccccaggatgtgatttccagaaccaaattctcctaagtatgacaaaatctacactgcatggcaccacatcttggtctatgatacagttaactcagcttcaaaatggagtgtcatcccaagtttagtaaatattggcaatacaatacatttaaaaaccaaaatggaacaaaataacagcaactcaaaatttcacccaatggggataccagttttaattattagtgactctttttttttttttttttttgagacggagtcttgctgtgtcaccgaggctggagtgcagtggcacgatttggctcactgcaacctccacctccctggttcaggcaattcccctgcctcagcctcccaagtagctgggagtacaggtgtccaccaccatgcctggctaacttttgtatttttagtagagatgggatttcaccatgttggacaggctggtctgaaactcctaacctcagatggtccacctgcatcggcctcccaaagtgctgggattacaggcatgagccaacacgcccggccaacttttttttttttttttttttaacaaaaatggtcttttaaactacaggttgcttttggtcgaaaaatatttttgttttttaaatcctttaaatggtttgtaacagactgcagttgatatttacaattctgcaaaagtgtggcagatccttctccttaggattgctagctccctcataggcacctttatatggagtcacctctgaaagtatagatgttacagtgtgtatgtgacagcaggtggaagtgagtgcaagagctacatgtgtgtcttctcaaggtaaacatacttaacaacatcctaccaaacatataccactttatacagtgttcatggctccttatgaataatttagggtatccaatgcagtctttttaaaatacaacattcacagtgagcataaaaactcagtccaatgaaaggttatgaaattagtggtgactgtacaaaattgcaaagagaaatcacaatgaacctactcacttaggaggtgaggggctcagaaaaaaaaaagcggggggtaagagagagagagaaagagaggcagagaggtatgtggtgttcttgcaccaacggggcaagaacaaatctattgcatagaatttcatttattgagagctatacatcaagttgtatttgtttaatgaggttggcaccagaaagatgtatagaacatgtcagacacccagtaccaatgcgtagtggggaaaagataacatctcagactgcgaccactcgcttcgtcttccagccagtgtctctatctgtcggctctttggggaataataaatgagggggcagaaggaacaagaagccaaataatgaaaaacacacacaaaaaggaaaaattataacatgggagagcaaagtagagccagatttactgacctcacaactacataatcaagaaaaagttatcactgaagaaacttttactaagcggagtgatcttaaataacagggagtcctgtgaaatttacagcgctcttaagatatgcaaattgaatgcaaggtatagacataagggtaattaattgtaaatctaagaataatgtttctttgtcaggctgtctccctgttgtggaatacattctaatgtgccttagcttggaatacttttttcaaggctgctctaattacaagatgttcagaatttcaaaatactagttattcttatcgtttaatttagcagctgtaacatttaataacagaatttactgattgcatgacaatattgtaatctttcaaggttaaagcgcttgttcccaagtccagcccatcaggatccatgtgcagagagaatgttatggataaagcactttccacaggtcctcaatgagtgttgcgggtggaagcgtcgcaggccagctgagcccaaaaatggggcttagcccacagggttctcggcttcatccagaaaagaattcaagggcaagccagtggtagggtagaagaaaacagctttactgaagtggcagtgttgcagctccgtgactgaccctgcagagcagggctaccctattggcagtgtgctgagaccagcagctcagggcagttttgcagtcatatttatacccacttttaattacatgcagagtaaggggctgtttatgtagaaatttctagggaaagggtagtaacttttggttcatcaggtcattactatggaaaggggtggtaactcccggctgttgtcatggcaacggtaaactgacatggcgcaccggccagcgtgtctgatggaaagttgcttccacccaggacctgttttagccagtcctcagtttggtcatgtgcctgagccccgcctccagagtcaagtcccgcctcctgcctctgagagatcccagtggttgctcactgctgcttagttgcctcacttcatccactggcacgtgcttctgggtcttacagtgatttccttatcatgctgggaacaatgtactgatttgtgctcttagtgtttagctctcttctacctgcccgtgaaaacctcccacttcttgttaatgaaagtgatggtgggattctgcagatgacggattcttagaaaattataagcaagaagacagggatagaagttttcaaatcaagggaacgtgactcttgactgtcatcaagaaagcttggttgtcgtcaagaaagctcttagtgaagaaccacttgaggaaagagctgggcaagaaggggtgtgaggggattccaccaagcaaataaggagtgacggtcctgctcaggaaggagaccactgaagggatgggatgccgattccatcttcaatcgtttctcagaaaacatttggccaagagtggactacacaactagaaggtctgggagtggagaagtgggcacgagattggcccaaggaaagtgctaggaaagatgggttaaactctctcttgggttaaagccgcaagggcagggggcccaggcaagtgctctctcgccctgaatgcttgggctgtgtgcatgcctggctgctatgacaacgcccactcttgccctcctcctgctccactggcttctcctctctgcctcctccacttgctcctggtctattcaatttccttaagacaaacctctgatgctcccctgagctctgtctggggccctttcctcctttcccctccacactcatcctgcaatcccatccagtcccaaagcactaaatgccatctctgtgggttgactgccctgaaatctccagcccagaccttccaggggcttatagcttcaatgacatctacttttgaatatctggtggacatttccaaactgctgcatttcaaatggagctgcttctgccgggaatgttctgctcctactgagagaatcctcaggctttgggtcacagctcaggggtcagtgtcctcggctcactcatcttacgcagggtgcctccctcatttctctgtcatatcgcccttacttatttccatcagagaaacttacacaatttatattgatttcaattgcatgtttattttatgctgcctgtgtgatctactaaaatcgaaactgaggtgggatggggaggacagggggcctcttggctgtgtccactgctctgatatctctgtcctgctgtcaatggcaggtgctcgatagatcaccagtgagtgaagtgctctggttaccaactcagaaagacagcgtggtctgtgcctcttcctaggactccacaatagccccatagtgaaagtccactgcatgcagagagatactgcagatagacagcatatctaggcatcctgtgcccatccctgggcatctcagttgagaaactgaagctggatcagaacagggctgtgagaacagcaaagagtttggaaagtaagccagtcaaggcttggtgttaggagacccagaacattgagcctagagggaaaggatgatttaacattttatggcacttatttactagatagtctggagggagagggatttaaattgctcagtacagctgcagagagcacacttagggcccaggatgtggatctgaggaagcagtgtagattggaagtcagacttgggcccagagcaaaacagccgtggactcagtctaggctctaccacttgctaccttgtggaattctgaacaacttactccattttgctatgcctgagctcatttccctgttgagaggatttagtgaaacatttgcaaagcacttagccttcaaatgctaaagagaggtttaggaaaacaaacatcccccaagctttgtatttgtagaaaacagtgaggttccattcagactaattgtggaatactgttaatcccttaccagctcgggcaataactctagtcttcagcaaggttgtagcattctcttccccaccctctcaaatatatctgggatttgtcaaagggctgtcttcactgtcctcataagccatcagcctgccaccactggccttggtcactttcagaaaacttggctccaggccccgattccaatgtaaccatcccagaaatttatcccagttactgaacattcatgctttaagaacagctcttgcaaggaagaaatctgagtttccctcttcctgccacaaaaataaacaaagaaaagtaaaagtcaaaccaaagcctgggagaagatatgcatgctgcatatatctgacaaaagacttagttctgtaatatgtaaagagttcctacaaatcaataattttaaaagccaatcacctcaaggtataaaatgggcagaagacttgaatggacacttcacacccaaaaaaagatatgagtaggccaggcatggtggctcacccctataatcccagcactttgggaggctgaggcaggcagatcacctgaggtcaggagttcaagaccagcctgaccaacatggataaaccccgtatctactaaaaaaatacaaaattagccaggcatggttgtgcatgcctgtaatcccagctactcaggaggctgaggcaggagaatcgcttgaactagggaggcagatgttgcagtgagcagagatcacaccatcccactccagccagggcaacaagagtgaaactctgtttcaaaaaaaaaaaaaaaaaaaagatacaagtagacattttgcacatgaagagacgttcaacatcattggtcatcagtgagatgcaaactaaaaccataatgagatgttatttcatatccagtatagtggctaaaattgaaaagtctgagagtcccaaaagtagacaaggatgtggaacaaccagaactcttgtatattgctggtggaatgtaatatggaacaaacactttggaaaactgctataaagttaaacaaacacttgccatttgacccacacaattccagtcaaagcttttttcaaagaagacaaagatgacatgatgacaatgaagaagaagcagaagaggaagaagaagaaggaggaggaggaggagacaacaatgatgacgatgaagaagaagcagaagaaggagcagaagaggaagaagaagggggaggaggaggagaaggaggagaaggaggaggagaaggaggagaaggaggaggagaaggaggagaagaagacaacgatgatgacaatgaagaagcagcagaagaggaagaagaagaaggaggaggaggaggagacaacaatgatgacgatgaagaagaagcagaagaaggagcagaagaggaagaaggagggggaggaggaggagaaggaggagaaggaggaggagaaggaggagaagaagacaacgatgataacaatgaagaagcagcagaagaagaagcagaagcagcagcagaagaagaacaagagaaagaagaagaagaacaaccacaacaacaaggaagaggaggaggaggaggaaatgaaatgaaaacttatttacaaaaagacttatacaaaaatattcatagccacattattcctatagccaaaaactgaaaacagtcaaatgtcccccaactgaggagtggataaacaagttgttttatgttgacaatatgagatactatttagaagcaaaaatgaaaagaacaaaaccctaatatatgagggaataagagaatctcaaaaatgtcacattgagccagacacaaaaaagtgtgcactgtatgactcctttctacggagtgctgtaccaggcaaaggccagctgtgaggacagaaatcagatcggtggctgcctctgcaaggagtatagagatggacttaggagacggaaggaattctctagagggacagaaatggtttatatctagaagggagggtgtctacgtatgtcaaaactcatcaaattgcaccctctgttgcatatacatttattttaataaagtagattataaaaggaaagagaaaagacaacaaaatatgtgtctactttaattatgctcagttggagagagcatgtcctattgcaggctgggccctaagtgttaagagctcaatgaagcatctctttaagaccaatcatattggctcttctctcccctgagtataccccaggccaccaagtaatcaggtctacttcagttctgttacactagccccaagaaaatcagttaatgcaaacagagaacagagacaggaggaccctgcaaagacctcccaaggggcaaccacgtgggttgactgtaagaggatcccctcaatcttggtggtgatttctccatttcatttgacctgggtggagctggggtagtacctgttaccccatcacttaatctagggagctgggatatctcagtgcatccctaaaatgtatgttcataatgaaggaagggttttattctctaccccaggagatgccttagagaaacaagaagcgctacaccaccactctagcgtctggagccctgtctgggaggttaggcagacatggggcaaatcctggctccacctcctcataagctgtgtgactttgagtgtgttcctgaatctctctgtgcctcagttaactcctctccgtaatgggtatagtcaaagagtgtatccgtctcaaggttgtcattagaagtaaataaactagtagaggtaaagggcttagcactttattaactctaagcattgggaacacttcataaaagttagctatgattattattacatgaacatgaggataaaagaaagtctgagattcagaggtaaatggatggaaggggaaaataagagattcagagaaagagaaggaatcaaagaaaaagactaaggtgagaatgaaataaaggcatacgagaaaaaggtagaaacagaagaagaatgaacccaaattatacttctctgcctaaagcttgccgaagcgttctgcacagctccctgagcataatctgggctcggttatttaaaaggctgtgggataatacagtgggaagacaggtctgcacggtaactcacacaatttatcacacagggaagagccactaatctttttaggaaacaaggtattcatagttatttaaggctaatatttatgcatgaccacacattgtgaacacagcccaatctccatcctcacccagccaagatctgggaaggtctttagcagcaatgttccatattttaagccccctacagaagtctcacccagtagtctgcaccggctctgttattaactgcatccatacaccagatatattcatgcacaccgctaattgaaagagcagattttcccgaggtgggtgagtactaagccgaggtgggtggatacagccttgcgtgaatttcttatgaccaaaaccacagtgttaccttgcaaaaggtaatcaattattcaaactcagaaccttcagaatatgcataaatatagtccaggcacagtccagctggtctatttcattagcctactctttacagggtgctgagaacaaaaggctggatgtaacaatacgagtgaccccagcaacaactagaaagatgcccgtttcctgcccaacccacagaggacccgatcttatctgcatttggccagaatatgaccttcagggacgttttctccagtcatggctgaggctgccttcttgtcccacagagggcccctttccttgtctctctcgttcttctcttttctactcctccctgccaagggacccagcttcatcctgcctccgtctagctgggtcatgccattgtctcctgatgtttcaccagcatatgctgggtcgtcatgcccttgccattttaatctgggttacttgtcttccttaaccctgggtgctcaagatggaatctctactggatcaataaacttcattctggtccatgttcaacccttcttactgactactctcaatgcagtattatcctcaaagacctcttctccaaccaggaggagaatgaggcagccaagaggaagaggggagcctgagtcatggctaaacaaagaggcttacaaacaaacaaaaattccagagaactatgacctgctgcatctatccaagaccaggatttttgaagcacaggaagaggtacggtgtgcactgcactgttgtcttgggaaacagttacttctttatgtctcaggatgttaggacgaggtgagcagccaatcccttctagatggaattacagaccctccacctttcttcatccttcctggttctccttcacatgcccatgaggacccacccactggttttccaaccatctgttgtttggtttttgtctggaagcacctggacattaaagtcctcccccgagtcaccctcgcggcatctgccatgtgcaaaggagcttgcaagggacctgccagtgaatttgggcaggaggcactggggaggggtctgcagtgattcagtgatattgtgaatcagtgatattgtgaatgcaaacctggctgggtatcagaatcacctgtggagttcaaaacaaaatgaaaccagaccacaaggatgcaactcaaacgttcagaattggtggcatctgtggcaggtcgagttctctgggaaagagggcaactctgaggtggggttaagggtgcaggaggtgtattaaggtccaccctggacatcagcacctgaggaggggacacaagcaggagtgaacaacaggaaaaatcaacatgcaatgcaagcctaacaatggccttggctccttgcaaaactcaggagctagaatggcccttcagagttctcccaagctgtccaggccttcatggttctggattgatctgtcattgaatgtgacccaccctggtgagccacccatcggcagctgaggcaatccctgaagggaatagtaactgcaggctgcctgcctgcctgcctgctgggaatgaggcgctatgtctccattgaaggtgaatctgggcagcacccaccacaacccatcctttgccaagatggtaactctttcccttgcctgcgggttctttgcacaaggagttcaagtgttcaggtggcaattactgtttattctggctctgtctgttggcaaaggtgcttcctctttgggacccaggacctataaacctgaagaacacagagttgtgggtacaggaagcacaaactccccaagtgagttaatgggtgtgacagcaaggaagacaatcctgcttccatcccttggttcctaggtgtgtggatattttccaacttttgggtaaatataattttatatgtatatatatatatgttagtaaagcatcaaataaatatcttaaagtgttttttgcatcctggagaatgattgctgccccatccttacaaatgatcacatctaagctggtaccttagttgtgcttcgtacagaccttttcaacactttattaggcaattttttttctttctaatttttattttaggttcaaggggtacatgtgcaggtttgttacatgggtaaattgcttgtcaaaggagtttggtgtacagataattttgtcacccaagtaatcagcataatgtctctattggtctattttcatactgctataaagaatgtctgagactgggtaatttataaagaaaagagatttaattaactcacagttccaaatggctgggaaggcctcaggaaacataatcatggtggaaggtgaaggggaagcaagcacgtcttacatggcagcaggagggggcggactgccaaacacttttaaaccattagctctcatgagaactccctcattatcatgaggacagcatggggaaaatgactgccataatccaatcacccccaaccaggtccctccctacacacatgagcattacaattagagatgagatttgggtgggaacacaaagacaaaccatatcaatatccaatagttttcagtccttgccctcctccaaccctccaccctccagtaggccccagtgtctgttgttcccatgcttatgtccattggtgctcaatgtttagctcccacttatgaggacatgcattgggtgtttggtttcctgttcttctgttaatttgcttaggataatggcctccagctccaaccatgtttctgcaaaggacatgattttgttctttttatggctatgtagtatttcatggagtatatgtaccacattttctttatccaatccaccactgatgggcacctaggttgattccatgtcgttgctattgtgaatagtgctgcaataaacatgtgtgtgcatgttagactagcaactttggatggtacgtatatgacatgacaaggtaatcttgacattgattccatgtcattgctattgcgaatagtgctgcaatgaacatgtgtgtgcatgttagactagcaactttggatggtacgtatatgacatgacaagttaatcttatggccatggacccaatcccataacttcctttgctttaaagtgggtctcctggaccaatgtgacactatatgggatcctatcccagtgtatcaagccctctgtaatcgcgcgaatggtggctgtcactgaagcttaatgggaaataaagtcccatacatgaaataagaaccccgctcccacaggaatgagtcactggtccttccagggtggaggaccccagtgtaatcaacttgccaacatgtatccaggtggtcctcttgagggatggtgccatatcagaaattcaacatgggtccttgttactggcattttggacaggcaatagcagcaacagctagattggccttggtaagccagagcctgtgctgttgggcccatgcaagtagccatccctgccaccatagctactttgctcatgtactttgctatcatgccatcattggggttgctgatgatacagggtggctagcatcagctgactaagtcagtttgtctacgtgatcatttagtgccactattacgctgaaagctctctgttggacattaatacacaatacacagatcttcatactttgtgcctgctccaaaatgcccagcctcatgactctgccttgaagctcccaggtgcaatctactctggctacttctaggccctgaccagacaacggagccattcaccattcagcctatggcatcatatggatattctaaccttgagcaacttctcttcccatacacagtggatgaccaggatggtctgagctttgccccttggaagaatgttccctcatcactgtctttcaaggcaatccttgagaggaaccatggtgcagccaccatctgttttcagcctgcaccctcatgcaagtctaacctttctgtgaaccaagctcaggccattttgtcttccatcagttggtcacaagggatcccctctacagcaggaggagctatctgaggaaaaggtgctgacataacagtggagggtgacatgtggatctggactacctgctcatgcaaattccctgtgccatccagtcctcctcatactggatcccaggtggaccctttctaccttctgatagtttgtttccaggcttgactagcattaggagttgctgagtctgacagatgagctcctgatgggcagctatggccacatgttcaccttgtgtcccatgatcgggtgtgtcatctctaccaaggcccataagacaatcagaagttgtttttcaaatggtgtataattttccctaagcagatgccatggccttgacccagaatcctagtgattctctcactggagcttgccataaactccacatggtgtgttttcaaagtgctgggatatacctctactaccaatgggtctgctgagttttatagcccaaatggcagggctgctcacacctgtagacagaacctgttatagagttctttcttgttctaggtcccattcaaatctggcagcctttcaagtcacctgggtcagcgcagtataggtatacattttgttgcttccagaatccagagaaacagagaacctaccagccattgtgcttccttgttttttgttgttgttattgttatgtgtttgttttgtgagacaaagtctcactctgtcgcctgggatggagtgcaatggcatgatcttggctcttggctcactgcaacctccacctccctagttcaagtgattgtcccgcctcagcctccggaatagctgggattagaggcatgtgccaccacgcccagctaattgtgattcctttttcacagcaggagatgcaatgtgcaatcatttcttctttagtttggaggcaatgttgtaatatttccttgaccactgaactcttaaaaatgtttactgatgcagcagactcctgaattttcataggctttgtctccctaactctggctcacatatgacttaccaaggcctccaacacgctacatatcttgcttatctggtcctattagcgtattcgctatggaacggatcattgtgattttctgttggatgtcaacatgggacagattactttggaccacattatgacagagggcaggaaagttaacagagccttggggaaatctatgaatgtatcctgttgtttgttccatgtaaatgtaaactatttctgatcatttctgataggtatggaagagaacacatttgctaaatcaatgctgcatatcatgaattgaggccatgttaatcaactccagcaaagacatcacagttgcatggcagctgcgatcagggttatgacgtggttgagtttgtggtgctcactgttatttttcaggatacatctggttttagcaggggctacactggtaaattaaatggatctctgacagaaaccaccacccctgcaacatctgttaggtttgtaagagtggggctaatgcttcccatctccttccccctgaaataatactgtttttattgtcttggcaggagcagggtgaggggcattttcagagtcttctcttggctcccctcactatgacagtttttactctacagtctaagggctcagcaaggaacttgcaccaactaccaagtgcctttattctgattttacatttggaggttaggaaaataaccaatttactgggcttaatgcattatcatggccttactatatgactgggggtacaatgggactaagtaataaatggagccctgttcaaaaccacccacccagtttctaggtcccattcaaatctgacaacctttcaaatcacctgataaatgcgtaatgctttaagccaagtaaattggttattttcccaaaccctgaatgtataatcaaaatagatgcactttggactaatatagaccaaagtaatcggtcctatgttgacatccagcaaaaaatcacaatgatctattccatagcaaatacgataataggacccgataagcaagacatatgtagcatgttggagaccttggtgagatatatgtggtctagagtttgggagataaaccctatgaagattcaggggtctactacatcagtaaaccttttaggagttcagccgtcaagggcatgtcaaaacattgcatttaaattaaaggagaaataatcgcattttgtatctcccaccatgaaaaaggaagcacaatgtctggtaggctttttggattctagaagaaaaaaaaaaaattgtatacctgggaattttgctatgacccaggtgacttgaaaggctgccagacttgaatgggacttagaacctgggtgggtggttttgaccaggactccatttattacctagttccattgtacctccagttgtatagtaaggccatgataatgctttaagtcttcaagtattaatgtcccctgacactgcttgaaatgtttgcctacttccctttttctggaatgtagttacccaagtatatggctaaagttctctttgaggaagaactggatgctcgtaacaatcaacacttgccatagtgctccagggtcctccagggtccttcctcttgagtatatatatggtgtggtatatatataaatggtgtgtgtgtatgtgtgtgtgtgtgtgtgtgtgtgtgtatatatatatggtgtgtgtatatatatatatatggtgtgtgtatatatatatatatggtgtgtatatatatatggtgtgtgtatatatatatggtgtgtgtgtgtgtgtatatatatatatatatatatatatatatatatatatatatatatatgaactagtatatttttgcatggggaacccttccactgaagggttaaaataaaaaatatttttatattgggttatggtccagtataaaaaatatactggaccatatattttttatgctggaccataacccttggactgaagggttccagttccaaaaaatagctcagatccaaaaaccgggcacagtatttggtcattttattgtggcaattcctcagcctccttaatcaatcattcttgatttctttagaaatcaagaaaaactgagtagtagtaattgagtaatacctgtgttggctgcctttaaggacaatcttgctctatcaaccatctccatatctctctgtaggacaggccaacctggctgccctgccaccatggctactcattaagataattgcatcttcttggcttctggtgtttaagcatcaccatctggactctattgttttgaggaatcctaacatccccattactctcagtgagccttattctgcagcgcctctcctaaagtctgccctggcctgctgaggcatgccaccaccaaactcctcagtgacactggtgcctttgccaccagggcattcctggtggctttgggaaattgggagccttctgggtcattccatgggacatcattctctggagggtttatctgtcttacatggtacatgctctcagcatgtccccctctctaaattgttaaatattttctattctcacttttgcaaaaatactcacattttaaccttagtgtgaactattctttttttttttctcctggggtctttctcaggcagacacatattttccatgcctgggagagtgctccagtattgaaaaaaaggtctcccttacccaaccttctcatttaatctggttctcttgacaacccctttccgaatgcaagccctgccattctcctctagcttatgtgggtacacactgcctagggtgggggtacattgtcccattctccctctatcaggccagcatattccccagctgagttacttatgcaagagctcaccaaaatgagtagcaaagcccagggaagaatccagttcacctgcattcctcgatcttcctggtatatcattgtgccctgcaaaaaaatatgccctaaccctatgcatttggcatgcctctgttggtctggaagacaacagtggtaatcatattcaccaaaaaatatagttaattcttcaacgttccatcttctacgtaaatataaaagtgctcctgggtatctctaaggacatagctgaactcatccaaaaggctttcaaaccttatttcagaatactgtttttaaagcattattctcctcccacctacatttcaaatcaaaccatgcttactttgacaaggatgctgtttttccttcaaagagccactccccaaaatgtacttagaaagaaggaaagaacatcactgttgagttgtaacaccagcttccctggagaggatcccagaaaaatgcacggattttcagcctttatgtaaaagcccaggacttcccaatcctcagtatgtgaaatatctcaaacaattagtttgtgaaagtgctgtcatgtgtaagcgaacaaaagccctagacataagaatgtgctcatccttctttcacccctggagcctttgttgagcatgtagtatgcacagaccccacatcagggactgtgggaaaacaggagtgatgcagccctgtgatccagcaggaaaagagggggttgttgggtcacattcctgaatctgaatccctgccaagactctctgaattgcatctgacaatgtccaagccttggttaattcttctgtaaaatggagatgcttgcctcaaggggtccttgtaaggagccaattagatcataaatacaaaggtactttctaagtagtgaagcactttctgtaggttaacactggctactgaaagaaaacccaggttgtgcttccaaataaatgcctatctagaagagaaagtaagacattgaacaattaaggaaaatgtactataaaaagtgagccaggataatggcttccagctccatccatgtccctgcaaagaacatgatctcgtttcctttttatggctgcatagtattccatggtgtatatgtaccacattttctttatccagtctatcactgatggacatttgggttgattccatgtctttgctattgtgaatagtgctgtgatgaacttacatgtgcatgtatctttaaaattgaatgatttatattcctttgagtatatactcagtaatgggattgctggaaacagaaaaccaaacactgcatgttctcatctataagcgggagctgaacaatgagaacacatagacacagggagggaaacaacacacactggggcctgtcagggaaggggtggggcaggaggagggagagcatcaggataaatagctaatgcatgctgggcttaatacgtaggtgataagttgataggtgtagcaaaccaccatggtacacatttacctatgtaacaaacctgcacttcctgcacatgtatcccggaacttaaaattaaatcaaattaaaaaatgttttaaagtgaaacaggacccaaagagaacaaacagaagagctctaactttgcccagaacaaagggggaagatgttatgttaaaggggccctgcagcatgatcagtatttacatactgatcatgttacatacataacaggctgtgggatgtggggataggactcaaaagctgggtttggcaggtttaaggatgctatgaagtttggatgttaatttgtctttcccaaacttctgtcatttagacactatcccattatctttgccaaacccatgcatttcctatcatgttatcaacttaatagctccctttcaatttttacatgaacacacttgtgctcattgccatatcacagcagtaatatctgtcaatgtacatgtttaatgtgctaggtgaacacttttctaatacacatgaaaattaatttaaaaaaaatttttttgagatgagacctcgctctgtcactcaggctggagtgcagtgttacctcgactcactgcaacctccacctgccaggttcaagcaattctcctgtctcagcctcctgagtagctgggattacaggcatccgccaccacgcccagctaatttttgtatttttagtacagacagggtttcaccatattggccaggctggtctcgaactcctgacctcaagtgatccacccgcctcagcctcccaaagtgctgggattacaggcgtgagccatcgcgcctggccaaaaattaacttataactataaagtgttcctttgtatcccactgaaaatcctattgtgttcatccatggtaaatgggccccacagggcaaggggagccactgggaagggtttggagggaaagaatgatgtaattagcatgttctcttttctggtagcccatgtaaaaaataccagttaggaagttatttcgattgcacccaggtgtcttttcctgacctggggacagaggagtggggatgagaaggagaagtgaactctatagggacactcagggctggttccctagaagggaagtgtggggccaaggagataggaaggagtccagaattttgaaacccagatgcagaaagcccttgaagctcaggaacttccctcagttttcactgattaactgaaaagcggaagttaacataaattaaacctggagtaaacataaactctgggtcacttctttggaaaatgaaagtaaatgcataaagttatttacatctttatgtttaaaaactatctaagggaaattggcttctgaaacaccatgtgttttcactcatcaaagacctatttagggacatgaccacatccggaaagcatttgtaaagcattaagatattaccgaaaaatgggttaagaacaggacaaacaagttacaaaaggagagctacaacttgccaagaaaatatgaagaaatactaaggctcaccaaaaaaaaactcttgtcaaataaagcaacgtgttactattttcaacgatcaaatgagcaacttttatgactgtgttagttattagggccttcaccagctatttccagctctcccttaaggactcacaaaggactccgcctcctggctctgtctgggtggatggggccacgtgattcgttttagacaatgaagtctgagcggaagtgacatttgtcacttctgggctagatggcttagttgccagttggagatgccccagagctttctttcctcctgcaacagtgaccaagcaacattccagatggtggctgctcaagcaggggtcccaaggtgatggacgcctggagcaaagcccagctgatgcaggatggacatggagtttgagtggagggtgaacttgggatgtcacaagccactaaaaatgggggtcgttaataaccctaccaacggattcaatggcaggggtcaatgctggcaaggggaaaatacaacaggaatggaatgcacattcctctaactcatgttaaaaatggttaccccctttgacccaaaaattccacttatggggatcaatccaaaaatgtaaaaatgcaaacaaaatatggaaaaagctttatggtgaagggatagactaatgaccaaaagcatggcctttaaggctgggcacggtggctcatgcctgtaatcccaggactttgggaggccgaggtgggcagatcacctgaggtcgggagttcaagaccagcctggccaatgtggcaaaaccctgtctctaccaaaaatacaaaaattagccaggcatgatggcaggtgcctgtgatcccagctactcgggaggctgaggtaggagaatcgcttgaacccgtgaggcggaggttgcagtgagctgagatcgcgccattgcactccagcctgggcgaccgagcaaggctccatctcaaaaacaaacaaacacgcaaacaaacaaaaaagcatggcctttgtcaaactgctatccatttgaattctggaattgccccttaccacctatgtaggtgattcgtagccttgggtgatttgtttaactgtctaaaccttagtttctttatctgtaagatgggggagatatttctttacctcatagtgttactgtaagaataaattagatgctgtatgtacaaaccttaatgaggctagctgtgtgactagtatcacacacacacacacacacacacacacacacacactaacacatctcaatgttactttcttagtccaacaagagaaaacttggatgcaacccagtaagccacaaaaaggactaataagggatagtaaacccacgagatggaaaatgtttatgtgataatactaattttaaaatcataagacaaaattgattacacaatataatcacaattatggaaaaataatgaatagaaacataatgagcagaaatatatcaagatcataatgagttgtgtttgaaacataaaattattgttttttttctacttctctgttttccaaatttcttaaagtgaggcacatgtgtggaccctgaaaggagacttctctagttttgaagcctaggcctcccacctctcagctgtgtgaccctgggcaacttacataagttctctggacagggttccccacttgcgaaatggaaatcacaatgttgtttcagtaatgaattagataatccctgtaaagttataagtataacgcctggaacagagtaagcagtcaataattattatctatttttgttgccattatcattgtatgttccttttgtaatgtgggaaagaacggtatttcacaatctatgataaagcttttaataacagaaggttgtctgtagcaaatacaatgctcttcacttgggaagttcacagtccaggaaagataacaaggcaaaagacaagcagttcagggctacagagaaaagcagaaagcactcacccccaggtcgggacaaaagagatggcctaaatgctgtcccaagaaaggcacttggcttggagcctccacatccccaaggtcagggccatcttgtcgggacgcatgcagaactctctcactgacagctgcccctgcagcagctggctcacccccatgatagatgagaattacagccattttcaagagaccaacagaaggtgggccgtgtcctgataagctataacaacagtagtaaagttctaaggagaccagagggtccccacaaccacacacttcctgcagctgtggctgctgtaattatggccgtgacagctgggcagccgggggacatgactggagtagactaaggcatgggcatatggcactgctggtgggcaaggccagcccacccctccctcaaccagtgcccaagttcagctgcatcctcgagcctgactgtcaggatgccatgaaataggtccccagcgcacccagtgggcaggtgcaagagaaggaagagctggagtgcatctttctggtgcccaggctttactggtgcccagggccagacacacagtgggcgctccacccttgccagcactgtctggaatggcagaaacacattccagagctcaatgctgctggcaatgtgtttgaactccccagccttccacgggaggcccatgctaacagaacaccctctagtcactcctccgaggacttgttggctggttcctcctctctgaaaaccacccggaatcatctgtcctcagacagaattaatcagtcacctctcctctcctatggctgagtcttcagtgcacatctatctaagaccatcccttgaatccataaccacatatctgtctcccctctaagcttcttccaaagagaggctgtgtccttctcattttatgttcaatcattaaagaacgattcatgattaatgaatcatttgttcaataaatagagcatgaaccatacaagatagacacgccatcctgggaccaagagtccaactaaataagaaattacaaagtaaaactttgggattataatagaccatgttaaggtgcattacatgtggcaatgagacctaatcaagtcttaagaaaccaaggaagtcttcctgcaggaagcctgaataggtgttaaagaagttcatgaaaattaattgtggagagggggtgatgatggaggaagacccagagagctgcaggagagacaagcctgggtgaactgtgggggcctttgcaggactgttaaaggccataggaagtcacattgatggctttaagccaggaaatggcatgatcgggtctgcaatttataaagagcagtctggttttctttggaggggaaaaaatggggcaaagtagcaataacaggctaggtgtgtcgcatcttagcacaaggcctggaacataatcactaccttctgtttgttggcctgaactaaaggaggtggaaacagaatggacaggtgcccaggtggcacatttcagggttttactcaccctattatccaacatgcatcaggtcaaccccacaggcccctgtcttgggagcctcaaccccaccctgaacagcctttgaagataatccatttccttcaaatatctccgtgtgcaccttccttgccctctaagatagcaacacctacctgcagacgtgaatgtgctgagctccacaccctccatccagaaggggatcaccgggatggcagggaaggagtgctgccaggaagttttccaactccagtttctaggtctgtatttaattccggatctatcagctaagcatttagggtgctgccactgaagctctgtgtttacacagctaaatgcctctgctcctattgacacaatgtcgatgaagagggatgcgtcaggctccgccaccaccaagcacgtcatgtgtcccagattgatgaagcttcctgacccactccagccccagcagctgcatggctcctgccactcagcccagcaagctgttctccatcatctccattaattaaggactgtcatagcagggaggtgagacagcaaatcctaaatacttgcctcaagtctcagcttccaaattcccaggagtcttaccctgaaaacagaaaagtcagatttaacagtggggtttttatctttccgtttacaaaattactaccagctcattatagcaaatgctaagaaatgcacaaacacaaacatacccagaagaaaataataatcactcatgatccccccattcagaggtaaatgctgatagcttttaaattcttacatatatttcttccatgcatatatacacatgtttaatcctgatattcagggactaagttcatgtcagtaaattgtttcctacaacattattgttaatcgctacgtagttttctgccttgtgactgtcctgtacttcaaccaatcttctattgcactcaatgtcgtgctattataatcaatacagtaatgaacatcctggaaataaatccttagagaagagttcattagacttcattagaataaatatatgatggaaaaataacctaccaaaagaaatttgcttttttaatactttggctgtgcattgtaaaatcaatcacactttagaaatgtatcaatttattcctccaccaacagaataacccctacaacacaactgcatatgcaactaacatagcaacagcaactgtatagtaatcctgatcactatcctgttacaaagagttaatgcttacctagaactctctatgctcctggtactgagcaaaatacattaaatatattgttccttttcatgttagctttttactttctagtgagggtgaacttttttcccttacattcattggccactgtgattctttgttataaaatttcctgcaattttcttggcctattttttagtgtgtttgtcatttaattattggtttgaaagcagtctgatttaataaggatgctatacacttgtgttgcaaaaatgctttcccccaggttgtggtttaacatttagttttgtttatgatcatgttgacataaagaattttgtcattttggagtagtcaaatgtgttggtctcttattttacagattacgcctttacatacactctgagtacttgcataccacaacatcagataaatattcatgtgttttccttaaaatctttctatggcttcaaattttatattaaatattttatcaatctgaaatttgttagtgtacgtggtgctgtaaagatctattttttttccacacggtcagcaaattgacctaatttgacttactgaattcctcatcttttccccactgatttgaaatgccacatttatcttatatgaaattcatatttacatgggcctgcttcagctctcctcgtactgttccattgatttatctgtctattcctgcaattaaaccagactatttaaatatatacgaagctacaaggacgtcactgcacattgcttacccagtagtgcaagttcctcctcacccttctactttttcaaaacattctcagcaattctaaagtgccagatgaatgtcagaatcattttataaagcaccacccctccaaagtcccactgatattttcatttggatcccattaaacgtctagatcatgtagagcgaatcggtaactttatgttattttaattttaattcaataacatggcatattttaaattcatattccttattttaatttcatcacatttctacatatttcttgtaaacttttccctagatattttattgttttgttgctaatgtaaatggcactttaaaaatcatcataccattggtgtaaagaaaaactaactttttacttatgtgattatgttgacaaaactttatctttaaacttgcttgatagtgtagtaatttttcagtttgttcccttgagttctccaggtagacaattctccttcatccaagtgtcagtaaccgtataatcaactactttcaaacagtaaatcctctattttgtagtcttggtttattcaattggtcagaatttttaaactgtgttaaatatggcatggatagtaagaattctgtcatatgtaaatagaaacgcctctagttttccattctaaaatataattaagctgttgacttgggggtgagagcctctttcttgataaagaaggttcaatttctatcatactaatattgttttagattttgtttcttgggaatgagtgttgaattttattataagccatttcagtaggagatgtgtttaaatcttctctcttgacatactaatatatttaaatatattattatacttataattagcattattatattataattagtattataattagtattataattagtattattatattatgattacaattagttttatattataattagtatattatcaaatataccaatatatttaaacatattggtacatttcctaatattaaattattcttgaattacttaatggaaaaaaactgaaccagaagatattgttcttttattccactgtcagatagttttcacgtattatttagcattttcacaatttcacatagtattcacattttcacatagtattttcacagtttccttttttgaactatcttcgtccagctttaatattagagtcaccacttcataaaatgaattaactagtgtttttgatgcaggtcaggtgagccccaaagtgagacttagcctgcgagggttcttggctttgcccagaaaagaattcaagggcaagccggtgctagggtagaagaaagcaactttactgaagcagcggtgttagagctccgtgactgcccctgcagagcagggcttccccacaggcagtatgctgagagcagcagctcaggacagttccgcagtcagatttctatctactcttaattacagatagagtaaggggcagttaatgaggaaatttctaggaaaagggtagtagcttttgggtaattggatcattgccacggaaagaggtagtaattcctggtgttgccatggcaatggtaaactgacatggtgcactagtgggagtgtcttatggaaagatgcttccacatttcctctgttttagctagtcctcaatttggtccagtgtccaagccccacctatggagctgagtctcacctcctaccttatttttaggggtatctatgctccgaaactatttgtataaaaaaatacatttcccataaaagcatctgtggtttcttttgttgttgtggaaagtaaacttttgataactttgaacagttctctcttagttacttatttgttcgagagtttcatagtcttgagtttccttaaaattttctaatatttattgtaaaaataatattaaaatgggatttgattatttactctcatttttcttataattttatgtttgaggggaattttatcctcatttcctggataaatatattagaaatttacttatattttaaagacacagaacttagatttatttgttgatcctatttatttttgttttgaaaataatttatttcattgtggttaatttaattttttttttttttagaaagagtctcactctgtcatccaggctgaagtgcagtggcacgatctccactcactgcaaactcctcctcccaggttcaagcaattctgcttcagcctcccaagctgggtataaaggcatgcaccaccatgtcaggctaatttttgtatttttagtagagatggggttttgccatgttggccagtctggtctcgaactcctgacctcaggtgatctgcccacctcggcctcccaaagtgctgggattacagatgtgagcaaccgcgcccagccagttaatttaaggacaaaggattcataacgtagcagtgttgacttgtggtctgtccttatcttcctcaatatatacatatatacaaaagcttttacatacataacatatagtattatatatatatatatgtttatgtacatatatatcatacatgtgaaaggtcttaaatttgaaatgcgttaaatattgtgtattaaatgtttaatacatattaaggcttacacattaaagcttttaactttttaattcctttccctttcttttgtactctttatttgcaatttccttcctggtatttatttacataattgcgtttatcacctaattcctttacatttacacttttagattgaataatggaagtagactatgaattttcctatgttcagctttgacagcatcctatgagttttgcttcttcgtgcctctttgtcagtattttccattgtttactatgattgtgatccacagtcacaaaaaaagttagaaagagaagttttaaaccatcaaaattatatcaccaacattttctattttaattatttgtttttctagataaacttatgaatgtatgttgttcataaattcagtgtagaaatacatagacaaaattagtagatcataaaataatgatcacataaataatgatttctatggcaaatgacaccatgaaccaagttttaaaaacaacaaattatgaaattttacaacctatgacaaagatatttcatttcaatcaataagaaaaaataactaaatctgcaaaaatatacacagaatataaacagaccactggtcaatatcactaaacctgtgcttttaaacacaaaataaaggaaacggaggactaacgatgattcaatgcaacttgttcatgcccttcctccatttttgaaattgcgttgtcaattttttgggggttttttttggaggcaaggtcttgctgtattgcccaggctggagtgcagtggcaccatcagggctcactgcagcctcaacctcccagactcaagcaatcctcctgcctcagcctcctgagtacaggagactacaggcacacaccaccacaccaggctaattgttttaaattttagtggagataaggtcttactatgttaaccagcttgccttgaactcctgagctcaagcggtcctcccacctcccaaagtgctgggatctcaggcatgagccactgcacccagtcatgttgtctttttacttattgattaaaaaaaactttatttgtgatattaatgctttattgtttattttgaaaagtctttttcatgatttgtcatttacattttaatattaagaacaatttgctatgtatttcttaaaaaattagtcaaatctgcgggtctcacctgtagcaaacacatactgagtgtttaatattaatacttatgtactaagcccacaagatttagctcagcataggtttcactcaattactgtagccaaagacactcaaactccagcagcttctcgaaaattctgtttgttcattaacgcacattgactctaatgtggagtcaagcaaataagtctttttaataagaatcatcacaattcatcagtcattatttacttagagtttcaaaatcaattttgcaatttctatcacatatattaagcacatgccatcaattttttaaaaattttttcttttcgtgtcatcaatttttatcttaaaacaatacatagtagtgtcataagaattacatgttcttctgaggacaggcctcttaaaaaaaaaactgcctatccctcttaaatgttatatttaaatccgaagaatgcaaggatatgattgttggatttattaagtgcagtacttgaaaaatatgaaatttccaatcacacttaaaatgaagtatgtgaataaataaaatgtgttaatttgtattaacatttttaggtctgcggaaatggcattgaatatgttacacctgctatagctaggacaccaagtttcttatacactcagctcatttacatctttccaaaacaatagctaacattgagcttaatggcaaaaaaatcaaaacatttgtaataaaatgagtaagaaaacataggtgtcatctttcactaccattatttaacatttcacaaaatgttaaaagcttctcctaattttttctgtaaaatagatatagatgtatctttccctaacttgattaacaaatattcctctctcaaattgacagcaccaggtgaggcactaaagaaattctttaaaatcggtaatataataagtatgtgctcaatctttgcattcaatttcatggatctcattgtgtatttaaggagaaagtaccacattagtttgattctagttgcttaataatatactttgttaaatatctcaatataatacatttacttccctccactcccatcctcattactctttattcagagcattagttctactcttccacttttacttttccagataaactttaagattattttatcaatttcaaaaagtcagtaaggagagaagagattgagaatggaagggattgcatcagggtgttttggtttgttttgttttgtttttgaggtggagtctcactctgtcgcccatgctggggtgcagtggcacaatctcggctcactgcaacctccacctcccaggttcaagcaattctcctgcctcagcccccagagctggaactacaggcatgcgccaccacgcccagctaatttttttatttttagtagagatggggtttcgccatgttgaccaggctggtcttgaactcctgacctcaggtgatccacccaccttggcctcccaaagttgcatcagggttttgactggcgttgcattcacgttggaagtaacttaggggagttgcagtcccttgcctccttgcctagcacaacatcctcattgttctccaggctcttcccctagttggtctttccttgtagtctctatcaatacatgatgttatttacaggaaagaggtcccgatccagaccccctggagaaggttcttggatctcacacaagaaagaattagggtgagtccatatagtaaagtgaaagcaagtttatcaagaaagtaaaggaataaagaatggctactccatacacagagtagccctgagggctgcttgttgcccatttttatggttatttcttgatgatatgctaaataaggagtgggttattcatgcttcccctttttagaccatatagggtaacctcctgacgttgccatggcatttgtaaactgtcatagtgctggtgggagtgtagcagtgaggaccaggtcactcttgtggccatcttggttttggtgggttttagccggtttccttactgcaacctgttttattagcgaagtctttatgacctgtatcttgtgccgacctcgtatctcatcctgtgacttagaatgccttaaccatctgggaatgtagtccagtaggtttcagcctcattttacccagctcctattcgagatggagttgctctggtccacatgcctctgacaattacattatacacttgttggtttttttctatgccacttgccatgtccgcagctgaaacacaaactccaggagagcaggactctctccaactcactcctgtatctccagtgccacagacgaagtctgtacccaccaatattttgcaatcaagggctgaggctcatagtttttcagttttcttaggcttttcagctacgtaatcatatcatcgacaaatagtgatgtatgcctcttgcttttcaatatatattcttacgtcactttcctatctaatgacattgcctcacaattccagaattctgttaaataaaagcaatgattaagcacatacttgtaatattgatttgaaaggatttctttttatgtcttttatatttttaaatttattttattttatttttatgagacagagtctcactctgtcacccaggctggagtgcagtggcacaatctcagctcactgcaacctctgccttctgggtcccagagattctcctgcctcagcctcccgcgtggctggggttacaggcatgcaccatcacaaccagctaatttttgtactttttagtagagacggggtttcaccatgttggccaggctggtctcaaactcttgacctcaggtgatcagccagccttggccacccaaagtgctgggagtacaggtgtgagccaccacacctggcctaaaggatttctttagtgtctcacctggtgctgtctgtcatttgagatacaaatctttgttaatcaagttagagaaagatacttctatatctattttactgtgaaaattcaggaaaagcttttaaaattttgttaaatgttaaataattatagtaatagaagacacctgtgtcttcttattcactttactgtaaatgttttgattttttgccattaagcctaatggtaggtattgtttttgaaagatttatttatgttctttgtgttatgagaattctcttgagagaattatcttgatttttcatagatgtgctttgaaagtttaaaagaaggagaatgcctacgcctacagctatatgagagtggctctttcgcaaacgtttaccatggtatttgtctatttagcttttctccttctttaatcaagattaatctgtatctttgcttataaaattatccattacatccacgtgttcaaagtttttacatcagaattttacaaatagtctattctgtctttcaattctctgtggttcttttactttcttttactattaaaaagcatactttttaatagtatgcttttatatttttaggttttatagtttatttattttaccatagtttaatctggctcttatttttattttatttatttatttggttcccagttcatcacatttcagcttttatcactacttgggtctaatgtgttgctttttagtcccccttttgagttgaattcttaattaagtaattcttaattctgaattacttaatttcatgtcttttttgttttgtttgactcttaaagggtaaagaatacgaatttttcctctcgatactgtactgagtacaagatactctataattgcagttttgttttaatcttcagcctaaaggtttagttttgttctgatttttgaacactagtgttattgttttaatggataaatggttagaataacaaaagggcattttctattgttatcagatactattcctaaattggtcaatgaatataacttgtagtgtatttagtttttgaatctactaacagtttgatggcctaatttgtattctgtgagaaggatgtggactcccctgtagaggtccatgcattggtgtggggccagtggctagacttctttggtcagcttggtgagtcaagggctaagagatgcactaggcaccatggttatagctgtagagtttgtcatttctcctttgtcctttatcaaagttagtattttgtaattttgttcataaccacccaagacagttgctcctttgttttgaattgttatttacaccactctgagatgctcttagacctgtttactttttacatgttaatgtaacaactgttatatagtgctagctatgccaggtgatatagtttggatgtgtccccacccaaatctcatctggaattgtagttcccataatccccacgtttcatgggagggacctggtgggaggtaattgaatcatgggggcagttaccctcatgctgttcttatgatagtgtgtgagttatcatgagatctgatggttttataaggggcttttcccccttttgctaggcacttctccttgctgctgccatgtgaagaacgacatgtttgcttcctcttcctccattattgtaagtttcctgaggcctttccaaccatactgatctctttcttttataaattacctggtcttgggtatgtgtttagtagcagcatgagaatggtctaatacaccaggcatcttataaatattaagtcatttaatccctgcaacaaccaatgagctaggtattattattctcattatacaggttaggaactaagatacagagacattcagttacaagctctaggcaccataaagagagggtcagaagtgttcttcatcccaagttccagattttctgttctttttaaaattatttgtattgagatagaattcacttataaaatgtgccactttaaatataatataattcagtgagttacagtatattcactgtgttgtgtagccatcactactaactaattccagaacatttccattacccataaaagaaatcttgtaccatcagcaaaatactgacctcacccccacatccctcaccccctatcaatcactcatttgctttctctctatatagatttgtctattctggacatttcatataaatggaatcacatgactgtggccttttgtgcctggcttctttcatctaccgtaatgctttcaggctcatccacattttagcaagtttcactactttactcctcgctatagctgagtaatattccattgtatggatataccacattttatttatccactcatcagctcacggatatttggattgtttccactttggggctaatatgaataatacctttatgaacattcatatacccatttttgggtgaacatatgttttcagttctcttggatatgcactttggagtaaaattgctgggtcatatggtaagactatgtttaactttttgaggaactgccaaactgttttccagagtggctgcactattttatatttccaccagcaatgtatgtggcagaatctgtgctgtcaagggctgtaatgtattactaatcagcatttaacttgaatttaactcgttcagatattattgtgtttacccccactttatttctgcttgtatttgtatgacatctccaaacttttaccttcagactgggtcattcatagttaaatatctctctttaatacaacacctgcaaaacttgtgggttttggacaagtataagattatttaactattaaatcaagatttgttgctacagcagatatatttactcttactttgctgtatttattttatgctttctctttttaatgttttcttcctctttatttttttctcttttgctctatatgaggtctgttttatttttttcccatctggtaatttggacgtagtacagttagattatatttctggtggtggctatgttttaactttatgtaaaatctttaaacatgtattatcaattatcagtttcagatatgaagcaagatgttttagtattttctacaaaagatgaagattctgcatactatcattatatctggcgccatcctcatcgcacactgttctctaaattgctatgctctgatatttctgaccctactaattttagctatattataattatttctatattgtgcagcttttctccctagaataagaatattttgatgctgtcttgtaatgttaattatcggtgctatttggctcggttctatgatcagtcctttcataaaacagcctcttcttttgtggatcttttggtttgctaaaataaaaaagcaaatgggtgatacatcctctgagtcctcgcatgttggagacttgttcctacagcttttactaaagacaaacaagtggactgaatatagtattctcagatcacatgtttttccatcacaaattttcttgacctattttctcagactttctgggatctgatgttgctgaggaaattctgaccaaaccaggattttaaattttctttgtgatttgtttttcagacctgggtgtttgttggcttcatccttgaattttaataattttcaccaggcattattgcatatattattcagaacacagtaagcccagtcatttttgtcaatttagtttttcctgcatttcaggatgatttttgttgtataactgcatgctattttggtttccacttgttgtatgctctaggtcggtcagcccacgtgttgctatggcgagcatgccccagtagccttccatatatgccttcctttctctcgtggttgttatttatttttcattttcctttgcatcttccaagattgtctaaagcctgttcatactcccagcccctgactcaggtttctgcagtattaattatcttctttgctacttctattttgtacattctgcactggtgttatttttccctcagtttctttcctcaaacctggcaaatgtcttttcttctcagtctgttctttgatcaagcttcctgtacacttgcagctgaccagcagaataatactggataaacatctcaaaatggaactaacatatataccctctgcttttttattcccttccccatgtcttacaattatggcatgttatgttggtttttccattggttaccttttaaagcttaagtaatgtactactacttttattcctgtttcatctgtgtttgatggtggcttctaatcccccactgtgtgaagtcaggacatctgtgtccttactcctccttgtacaccttcccccgacacattttgatcctccagtcaagtcttccacacatccttcttagggtgactctaaaacatgaaaaccatgaatcagtattatcacaatgaaactattcagtgcaggccaaaaaatgtaccagaattctaccttcttctcggaaactcaatgccatagaccctggagattcagagaagaatattcctagctcaaaaatgaagtggaatctaattttttgcatcaagtgtttaaaataacagagcaattttgttggcttcctattcaatatatgacattcttgcagtctttttgtttttgttgttttatttctgttttgtttttctcctggagtttataattgcattttttgggggggtgctttttgcttttgtcatatttatttttttaaaaacttttcagatactttttattctatcatattctgacattctccttccaaatccctctcctctatcccctacaataaaccacttgcctacttcaactgctgcatggctgtcatccagggacctcagaccagtgtctccctgtttcctagatagatatatatctttctcttcttgatttagttcctcatagtcctagagacatatccatacccctttttaaggaggggcttgcttaaacattacaacatcacgagaaagctacaagccaattttcctcaaaaacgtgataatgctttaacaaatacaatctagtaatatatacatatatatatacatatatatatacacacacatatatatttgtgtgtatacatatttgtatgcatgggaatatatacatattttgtatatatatatgtatgtgtgtatatatagatacactatatatatacacacacactatatatatatgtatgtatatatatatatataaaatgggatttatcctagaaattcaggattgcttaattgtcaaaaatccatgtatttcacagtgttaacaaattaaataagaaaaatcatgatctcaatagatgcacaaaacaacaaattctaacacctattcttggtaaaaaataaacaaaacaacaacaacaacaataaaaatctcttagcaaacaagaacagaagggagctttctcaacctctgaattgtgaaatacttaatggcaaaacactgaacatttttctgctaggataaattaaaaggcaagggcatcaaatatcaccacatgtatgataaacactggtctagacagtaagacactgcaagaaaagaaaaatagtcatactagtgaaaaggaagaaacataattgtctttatttgcagagaatatgattatctgtgtataaatattaaagactctaccaaaacaagctagaactaatatgtgaatccttttgccagtggtgggtcttgcttccacgttgatggctactgactgatcagggtggtggatgctgaaggttggggtagttgtggcgatttcttaaaataagacaacagttaagtttgtcacatcgattgactttttcttacacaaaagatttatctgtagcatgtgatactgttttatagcatttatctacagtagaacttctttcaaaattagagtaaatactctcaaaccctgccacttgtttctcaactaagtttatgcactattctaaatactttgttgtcatttcaacaatattcacagcattttcaccaggaatagattccatctcaagaaaccactgtcatagctcaaccgtaaggaagcaattcttcatccattcagttctgagcatgagattgcaaccaattcagtcccatcttcaggctccacttctaatcttagtcctcttgctagctccaccacatctgcagttactttccccactgaagtcttgaacccctcaaagtcaactttttccaaactcctattattgttcatttttttacttcctcccatgaattacaaatgttcttaatggcatctaggtaggtgaatcctttccagaaggttttcaatttatgttgcccagatccatcagaggaattactgttgatggcagctattgccttacaaaatgtatttcttaaataataagacttgaaagttaaaattacaccttgattcatgggctgcagcactgatgttgcgttaaacaggctggaaaacaacattaatttctttgtacatctccatcagagttctcaggtgaactagtgctttgtcaatgaggagtaatattttgaaaacaaaaaaatcttttttctgagtagtaggtctcaacaatgggtttaaaatattcagtaaaccaggctgtaaatgggtgagttgtcgatcatattttgtttttccatttctagagcacaagcagaataggtttagcataattcttaagggtcctagaattttccgaatagctggtgagccgtggttttaacttagtgtcaccagttgaattagcccctaatgatagggttagtctgcccttgaagctttgaagccaggcattgacttctcttctccagcaatgaaagtcttaggtggcttattttcccaatagaagtctgttttgtctgcatttaaaatctgtggtttaatgttgccatcttcatcaataatcttagctaaatcttctgggtaacttgctacaacttcttcatcagcacgtgctgcttcaccttgtacttttatgttatagagatggtttctttccttaagcctcatgaaccaacctctgctagcttccaacttttctgcaacttctttgtctctctcagccttcatagtgttaaagagagttaggggattgctctggattaggctttgacttaagggaatgttgtggctggtttgatcttcttacctgaccactaaaactttctccatatcagcaataagtctgtttagctttcttatcattcacatgttcactggagtaacacttttaatttccttcaaaaacttcttctttgcattcacaaattggctttctagtgtaagaggcctaggtttcagcctatctagctctgctttttgtctgtcttcctcactgagcttaatcatttctagctttttatttaaaatgagagatgcacaactcttcctttcacttgaacacttaggggccattgtagggtaattaattgtcctaatttcaatattgctgtgtctcaggaaatatctaagcccaaggaaagggagagagaaggggaaatggctagccaatggagcagccagaacacatacaacatttatgggctaaattcattgtcatatatgggtgcagttcatggtgacctagaacaattacaataataatatcaaagatataataataatgaaaaagtttggaatattgcaaaaattaccaaaatgtgacaccaaaacctgaagtgagcacatgctattagaaaaatggtactgatagacttactcaacacagggttggcacaaatcttcaatttgtaaaaaacacagtatctccaaaggacaataaacaaagcacaataaaatcaggtatgcctgcacaatagcctcagaaatagaaactgctggggaataaatttaacaaggtaggtgcaaggcctataaactgaaaactacacagtatggctctaagaaagtaaacaaaagctcaacacatggagagagatgacatatccatggatcagaagatttactagtattaaattgtcagttatcttcaaatcaacctatagattcattgcaatgctaatcaaaatcccaacagcagttttgttgaaattggcaagcatacacatatgtgtgtgtgtgatatatatatatatatatatatacacacatatatatatatatatatatatatatacacacatatatatatatacatatatatatcttccccctggctatatatatatgtgtgtgtgtatatgtgcatacatatatatatatacatatacatatatatatgtatatatatatacgtgtgtgtatatatatatatatatatatatatatatatatatatagccaggcacagtggctcatgcctgtaatcccagcactttgggagactgagggggggagatcatgaggtcaggagttcaagaccagcctgactaacatggagaaaccccatctctactaaaaatacaaaaatcagctgggcgtggtggttcacgcctgtaatcccagctacttgggaggctgaggcaggagaatcacttaaaccaaggaggcagaggttgcgatgagtggagatcacacccctgcactccagcctgggcaacaagagcaaaactcatctcaaaaaaataaaagctatatatatatatatatatatataatatatatatatatataatgtacatgtctacatgtgtatttacttatatggaaacgcaaagatccagattagctaaagaaatttgtaaaagaacaaagttaaataactcatattacctgatttcaagcttactataaacctgcagtagtgaagacagtgtgcattagttaaaggacagacttactgcttaacggaatgaaataaagaggtcagaaatacacccgctcaaacatggtcaactgatttttaacaaaagtactaagaaaatccagtaaggaaaggatggtctttttaaaaaatgtgctggaaaaattgaacatccatgtgcaataaataaaaaaaggaacttgacatcacaccagacacaagcattaactcaaactaaattgtagacctaaatgtaggaactgattgtgtatattctggaataaaatataaaagaaagttattgtgaccttagattaagcaaagatttcttagatacacgaaaagaaagacccccaaaaaatgatcaattgtattttattataattaaagacttttatacttcataaggcaccattatgacaatgaaaaagcaagccagaactgggggaaaattttcacaaaacagtatctcataaaagacttgtaaccaggatatataaagaactcatacagtgcaataaaaaataaaaattagcaaaattttttaattgtcatttcacaaaagaatgtttaaagatggcaaatcagcataagaaaaaatgtgcaacatcattagacattagggaaatgaaaattaaaatcaaagtgagataccatcatacacctattagaatggtgtaaaaaatgccaagtgcccagccagaatggccattattataaagtcaaaaacaaataaatgttggtgcggaggctgtggaaagggaacatttatatactgttggtgggaatgtaagttagtacaacctttatgaaaaacagtatgaagatttctcaaagaactaaaagtagatctaccatttgatccagtaatcccactactgggcatgtaccccaaggaaaagaagtcactgtatcaaaaagacacctggaggcatttttgttgctgcacaattcacaactgaaaagacatacaatcaacctaagtgcccatcaaccaatgagtggataaagaaaacgtggtatatacacatcatggaatactactcagccataaaagggaatgaaataatgtatttagcagcaacttggatgaaacaggaggccattatcctaactgaaataactcaggaacaacaacaacaaaaaaaaaaaaaaatattgcatgttctcacttataagtgggtgctaaactatggatacccaaaggcatacaaagttgtataatggacattggagactcagaagaggggagggtcggaggggatgagagatgaaaaattacctatttagtacaatgtccactatttaggtaatgggcacactaaaagcccagacttcaccactatacaaatcatccatgtaaccaaaacctcttgtattcctgaaactatggaaataagaaaaaattgaatgtcaaatactgcccaaaatgtaaagcaactggaatcctcatcctttactgatgagaatacaaagtggaaaagccactttggaaaagagtatgatagtttcttataaaattaaacatatgcttctatgcagtgcagccatttcacgcctagatatttacttaaacgcaaaggaacattcattcacacaaagactagtatacagatgatcagggcataatatctcaaaattggaagcaacccaaacacgcctcttccagtgatagaaaagcgcattctcctatggtcttacaatagaatactacacagcaagaaaaaggaatgaattactcatccactaaacaatatggatgaatctcaaaagtgttacaccaagggaaagaagccccagaagacaatatttgccatgattccatttctatgaaattctcagaacaaaaaccagtagaagaaacctttttggagtaatggaactgttctgtgtcataatcaagcatgcgtcaaaactcatcaaattccaagattaaatatggaaactttgattctatgtaaatcttacttccataaagctgattgattaagagggtgcttagcagatcagctttctgagtcttcactgagtctttgcccttggaccaaattccacttttgagtgatggctaaactacgcatgggattttcggtcccactatttcttctcctccaaatgtcgaaagcattgtcttctagcatccaattgttacttttgaaaactcaaatcacagtctgattctcatgaggtgacttttttctcttgttttaatttttatgacaatgatgttaacaaacacttactgagagctgcagtgttcccaggcctgttctccacaccctactcccagcgccttgggattgctgcatgataaatccagccataacgtctttttcattgctgttctgagaactcagagaacttctccaatataaagactactatcctttgggggcggtttcttctattgtttcctgaccattattttctttctcagcatcttctgttttctgctgctagtacatccaataataggcattagagctcttgggattgatcctttatttctcatatctctcatcttataatttctcctctttccagactttttattgcttcttttattttggcaatcattattttaatctctaagacattttctgttttctgagtgatccttctccctaggctactattcttgttcttgaatgtaacctcttcttgaaagacattgaatgtgctttcagaacatttgttttatcttgatcttacattggcctttctcttttacctgctacacagacacacacacacacacacacacacacacacacacacatctctgatgatccttggttgtctactcatagataagaagggtgaggtaggtgggtgagcttcctgcaaggcaagttctccaagtgaagattctgctaagagttctttgggaggcagagaatggcagaaaaaaaattgaataacaggttttggattaggtgaggagggggttggaagagcgggtaagtcaggggagggtggggggaggagacacctgatacctaccaaaatgaggagttcagtcagtcctatgcattgtcattcaaacagaaagacatagcctttttcaggaaatatgttctgtttgtttgtttgttttcttgcctgtgttttggtgtaagggtcccctttacctctccctgaaaaataaattccggcaacctgaattcaactcagcatgaagaaacaggaaaggaccatccttaggttgtacaatgacctccaacaaatccacctacttctagaccaactctactcccctgttctctggcagccaggttgtctctgagccaggaacctctcaggccacctaccttccacctccttgccaatctcttgctgcacattctggtccatgctatttttgaattattcatgcacaagcatactactatccactctgattcagaataccttttcaccctggttgaagacctgctccctactctcttatattcgactttctataggatttttttgtgtatttgttttaactttttttcttttgtttgtacttccatctggtcatcactaccggatctaagaaaagtggagtgtaaacaactgcaccttcattgttttaaggtaaaagtcctcttcacccttcatctttttcccaccaaaactgcttctgctaatggaatccgtattaatccgttttcacactgtggataaagacatgcccaagactgggtaatttataaagaaaaataagtttaatgaactcacagttccacatggctggggaggcctcacaatcatggcagaaggcaagtcacatcttacatggcagcaggaaagagagaatgaaagccaagagaaaggggtttccccttataaaaccatccgatcttattcactaccacaagaacagtatgggggaaaccgcccccacgattcaattacctcccactgggtctctcccacaacacatgggcattatgggagctacaattcaagatgagatttgagttgggacacagccagaccatatcagaatctaccaccacagccctgtataagtcactatgataaaacgtggtgaaaagttctatgaccattttaaagatattaaaaacatttatatattccttataagttctacacatttgtcaagcaaatcaagatgaattttataataacaaagatgaatcacataatcaatttttgtatattcttacttaatacggttcttgctttgccaaagactgaatggtcagttttaattgttcactataattttggttttccaataacaactttaaaaattgctttatatatttagaggttgttaagtggggcataaaagttcatggttactctaactttataataaagtggatcttttattgaagtaagataactatagtccgttaaatttttttattttacattttattttcccagtacctaatattgtcagtgcatctttctttggtttgtatattcttagcatgcccttgtctatcccattattcttactttttctctgaaaatttgattttgttgtttctcctaagtagtaaaaaagcctctatttctatttggttttgatcgctgaaaaaaatgtaataccactcattcatttaacaaacgttttttgagcaaatgctgtgtgttagatctcatattcaaaggtggaaagaacaaaaattgtcctagccattataattgttgcaccttattttctctacttaggtatacagacgttttggtttttagctcattcttcaaatccttacctttggattaaaaggaggaaaagaaaaataataatacattacttattcattatttaaaaacaaattttcttaaaaaactagaaatacaagatctcctagagatcataaatgacaaaaagcatgcccaattttattaattctactaaacattttaatggaggttctaaccagtgcaataaagcaagaaaaataaatataagacacgtcaattttggggaaaaatattaccattatttacagatgacatgactgtgtacaaagaaaatccaaaagaatctatatacaattagaattaacatagaacctaggaaaggtgctaaataccaggaaatacacaaaaatcaattttatttctatataccatcaacaaacagaaaataaaatattaaaaattaatgcttgcattagcatcaaagtacaagaaatatctagaaataaatctaataaaaatgtgcaagacatcttcactaaaaactacaaattattattgagagaaaccaaagggaaatctaaataaatggaagatttgatttgtaaagacacaaagcttcccaaattgccctattgctctacaaatgtactacgatcccccaaaaatctaagcagaggtgtgtgtgtgtgtttatatataaatttacaagatgactcttaaatgtttatgaaaattcaaagggcctacgatagccaaggaaattgtaaggcgaaaaaaataatctgcaaaactcacattaccacatattaagacttttaataaagctataataaataggtcagtgtgatattagtgcaaagatagatcaaaaaaccccaagtgaaatagaagaaagagttcagaaacaaaacacaccaatattcagccacctgatttatgaaaaatcaactccatagtatagccttttcaataaatggtgctaagctaattgaatatctagaagagaaaaaaatttatcttgacccctatctcacatcatacacaaaaatcaattccagatggactgcagctctaaatgtaaaatgttaaacagtaaaactttaagagaaaaacatcttgcaaatgtgagtacacacaaattcttttttttttttttttttttttttttttttgagatggagttttgctgttgccagactggagtgcagtggcacgatctcggctcagtgcaacctccgcctcccaggttcaagtgattctcctgcctcagcctcctgagtagctgggtctacaggtgtgcaccaccacatccagctaatttttgtatttttagtagagacagggtttcaccgtgttagccagatggtctctatctcttgaccttgtgaagtacacacaaattcttaataaggagacacacacaccacaaatacgacgaataagaaggccaaccacagcatggtagaagaaacatacacacacacatatacacacacacacatctccagcaaaggtcttttatcgaaaaggtactagttaatttgaaaaaaatattttttaaatagataaatggtccgaagacatgaacagatagttcacaaaaagacttctaactgaccaataaacacataaaaaggcatttaatactagtcagggaaatgtaaaatgtcatcagggaagtgtaaattaaaattaaaatacaatgctctaatcatcacagtggctaaaattgaaagaatagaaaatgctgatgtatattgatgaactggaactctcatgcacccttcttgatggtgaaaattgcaatattttggaaaagtatttggcagtatctactgaacctgaccatctgtgtatctttgcctgagccattctactcctaagtgcatatgcaaccaaaatgcacagatatttttaacaaaaaaaagtattagtagatccatggcagtgccattcatattaatcaaaaactggaaactcctgaaatgccatcaacagtcgaatggataaggaaattgtgatgcatcatacaatggggtgccctccagcagagaaaacagaaaatcgacaactgccttctccaaagaaatcttacaaacataatgttgagggatagaatctggaagaataaatgcatactctatgactcaaaattatttttaacaagagtctggatagtgattacccttggcgggggcagaaacttccttcttgggaaggaagcaagaagtaccctctaggttttagtcatattcttcctattgatctacagtgcttattacacagctgagttcattgtgtgcaaattcattgagctgatcgtacagtccttttctgtgtgtgtgttatactttcataaagttaaacagaaataaaagacaacttacctttatttttttatttatttatttttatttatttatttatttatgagacagagtctcactctgtcacccaggttggagtgcagtggcaccatctcagctcactgcaacctctgcctcccaggttcaagcgatttttctgcctcagcctcccgagtagaggggactacaggcaagtgccaccatgcccggctaatttttgtatttttggtagagacaggttttcaccatgttggccaggctggtctccaactcttgacctcaggtgatctgcctgcctcggcctcccaaaatgctgggattacagaaatgagccaccgcgcctggccaacttacctttatttttataattgttggttctacatgaactgaacacaggagatactatgtttagatcatctttgtaaaatgagaatatgaatattgttcttctccaccctttttagctttcttcattagaaatatttaagcccaaactattgtcatttttagcaattgttattttatgtattgcgcattattttgcattttgtgtaatagccacgttgaccccaattatatagacttaaacatttagctggatttctgttcttattttagactttttgtagctcatactctctattcctgacttacagattttgattcacctcccatttaatcgggaaacatctttcgagcggctgttatagaaagaatagctgattcatgatttttgtcatatttgataggattggtctttcttctacctccttatttaacacttgttttctgcttattacttgtgggtttgttttttgtttgttggttggctggttggttttgagacagagcctcgctctgtggcctaggctggagtgcagtggcacaatctctgctcactgcaagctccgcctcctgcgttcacgccattctcctgcctcagcctcccgaatagctgggactacaggcgcccgccaccactcctggctaattttttgtatttttagtagagacggggtttcaccatgttagccaggatggttccgatctcctgacctcgtgatgcacccgcctcggcctcctaaagggctgggattacaggagtgagccacagtgcccagcacttgtgggtatttttttaaacttttgtttgtggacctagtttcgtttgctcttttcaaaataattagtaatatggaaattaagcatcttattactatactcacatggttggactaaaattttgagaaaatatattttttcctacttatcaacattgaaaatgtacaatatctctctactcacccttatgtaaaatgataaattctgtgaacgtcttatgtaaaatgataattctgtgtaccctcttaataccatacactctgtattctcaatcttagttgatatatatggaatttaaatatttccactaaataacttatttttcgcctttgccataaactccatagtcatatttaacacaattatcctgaataaatattgtttcctttttagtgctttgtgccatttcattttcactacatcttcccatttcttgagttctgtattatttatatgcccttcattcagctggagcatttctttgagtttttttaaatgaagggcacgtgggtggtatacttcctaagtactttcatatttcaaaatcttcaaggttgtctcaggaatgatagtctgagaggatgtaaaattgtgttttcaattaaaaataacctcttattattacaaaggcagtatatgtacacagtagaaaattagaaaatataggtaagtaaaagtaagataataaaaccaccatatttccactactaaagagattaccactgttaacactcagatgatgtcctctcagatctattgctatgcacatagatgtgcattttatcaaagtaagattatactgtgtacattgttttgcaacgtgcttttattcaataaataaatgtctacttgtccatggcattaaactgtaatatcattgatatggtttggctgtgtcctgacacaaatctcatcttgaattgtagcttccataattcccacgtgttgggggagggatctggtgggggataattgaatcatgggagtggtttcccccatacagttcttatggcactgaataagtctcatgaaatctgatggttttataaggggtttcctttttcacttggctcccattctctctcttgcctgctgccatgtaaaatgtgccttttgccttctgccatgattgtgaggcttccccagccacatggaactgtgagtcctttaaatctgtcttcctttataaattactcagtctcgtgtgtgtctttatcagcagtgtgagaatggactaatacgaccattaaatgcccaagctgtactcaaatttccccaattgtcttttaaagtgagtttgcccaaaatagatgcaatctgggtggctattcccttattttatgtcaatctggaacaagccctttttcacgatgatggttgttgaaaagagtgggacaaatgctcatcttctagatttttctactcagctctttctgtaccattattgagaagcaatcatctttctgcaaatctctatattctgcctggcctcctgtcatttagcattgcagaagcaaattcagatagcaacttaatttctgccccttcttcctgacttgtattgtctactcttgaacttcaaaaatgtcatggagcactatctccatggggagctgttcattaattatgactggttctcaggtagtcagtgagctttcatctaaaagctaaagtttttattgagctcaaatacttttttttgtttttttggtctgctctgctatttccttctggaatttctagcgcatgtgatttgaattttctggacttacctcctgagcttgtctccttcctgttctttgattcattttcatctcttttctctgagttataagaaagcatcttccagttcatggatctgggaatgaacacaagggtggaattctcagtgttaacacatgactcaagggcacgggtattagcaactccaagcagcatccgttgagttcttccctgaatcaggttctagtctgcacactgcaaggatcatctcaatcaatcatcacatcaaacctattaggcgaggattctcactaaacccattttacagatgatgaaactgagacacctaggggatacataacttgcccaattacatggctaataagtagtcagcctgggattcaaacccaggcttctcctcgctctctgcactgctgggaacctggattggtcccaccctgcctgtctcacagccctattgcccccaccccttgttagtgggctcctacttaactcctttccaggtaaattgttcatatgaatgctgccaatgatggacaggcacatcactggtctgccgctttgagctctacatttcatagaaatgttgtcaaactgttgtgatgtggctggctaccttccctgatttccagtgtggacacagattttcccctatatacattcccttggatatttccatggaaaacctcatgcttagtgtacctttagaggtttctttatctcccctaccaaaatgcaagccagcatgaccattcattcctattccccatcactctcatttatcctctttggttttgcaagaaattgacccatgtaatgcattcattgtggccttgcctcacagcccagcaccatactgtccaagtgaaatgccctttccctcatcctccccattgaaaatccttatcaaccttccatgggcagctcaaatgccaactggcccttaaagcgctccttcaccccattccatgtcctgtgtcctctccttcctcagatgtcccttaggaacctctactccccagtggcctgctctcagtcaggatcccagcaccaaacagatggtgcatcccagggaagataatccagagagagtttatgcacaaaggggtagactacaaagtgataagtgtctgttgtctggacctaacagaaagagagaagaagtcgtccccggggcctggaaggagagaatcctgcattgttttgagaatggcagagactttcagtccagggagaaactaccccaaggccattgcagagggagagagactcatccgatgaaatactctcacctcagtccctctcttcctccctccaggctcttgccatggttcccctttgtcagaaaacaaccagagggcatgtggcccagcaccccttgatataatcatgcacatcagccacctggggctgagaacagggaggagaaaggaaaggggtgagtgctgacaggcaaaggaaggtatcagctacagactctgccacttgcattgttcatggtaatcatttacatcttaactttccctccagctcttgagggtgggcaatatggctctgcatttcagtaccccagtgtctagcacggcagtgggtatgcagcctgagctcagtgaagttgcttcctcactcatgaggaagcagtcacgttatgacttcctcatttgctttgttattctagaggtggaaaagggtggcctgagtcatcttaactccattcttgtgggattgtgaattctgtgggattggggggttgggggattctggtgaggccgtggacagattctttgcaacatgtatgcctggccctttcgatgtgaaaccctgcagctggcgtcacctgtgttgcattctgaatgggtgagccaacccaggctccaccatctgtaccaggcacagggagcaccagcaaccagccactgccttgtgtcatccttgtattccttcatcaatcgatgtgttcgttcatttgttaagcactcattcagcagctactacatacagcaagggttccaaacccatatggcatcatgggaaaccattccccactcttctggtaacaaatctcacacataatccaggcctaatagtgctcatgagaaggtgagagaatgggaacaagagggaaagggatgggcctgaaggagcacagctaataagcagcaaagcacagcttgagagctaagtacacgctagcacactgcccagacacacatctcagggcccctggaataaaggtgactgtgttcacatcagagtgaatgtgttaatgagaagaaagagggcctggcacagcaactcactgttctaatcaaagcactttgggaggctgaggtggaaggatcacttgagcccaggagttcaagaccagcctgggcaacatagcaagatccttgtctctataaaaacctccaaaaattagctgagcacactggcatgtgccttgtagtcccagtgactcaggaggctcaggcagcaggatcacttatcaagtgaggttgaagctgcagtgagtcgtgattgcctgccacctggggtgatcatataatttgttgtgtcaactggaccactttacagacagagaggtgtgtggttataccacgaaaacaagcatttaccttcactgacccagaccagtcagtgtgtatggccaccctaccagaagcgccaggcatacatgttgcaaagaatctgtccatggccccaccagaatcccataatcaatgggaacaccaagaaggaagttaagatgactcaggccaccctcttccacctctaaaataacacacacagaaaaatgtcatatcatgactgctccgtctctcaacgcaacctcactcagtccaggcagcacacccacccaccaccatgttaggcactgagtacagacacttcagcctgggcgacaaagtgagacactgcctctaaaaaaaataaaagagagagaggaaagaagtcctccattctggtgttcgtgcatggcccctgtaagactggataactgggaggccgaggcgggcggatcacaaggtcaggagattgagaccatcctggctaacacggtgaaaccccgtctctactaaaaatacaaaaaattagccgggcgtggtggcgggcacctgtagtcccagctactcggaaggctgaggcaggagaatggcgtgaacccgggaggcggagcttgcagtgagccaagatggcgccactgcactccagcctgggccacagagcaagactccgtctcaaaaaaaaaaaaaagactggataaggtccttggcttttctcagtttcatgatgtgaccacatcatgtgagcttgtggcagtggaaatacgtggtcagggaggtggggcatccaagcaggggaaagggagcattcccatggccaacccacccacacagcctccacccaagggcatcccagcttggaaactgactttggaaacacaacatgtgagactgtgattttgattagaatgacatggatctgagacagctacattttttcccaaggaaaaactctctccaaacaaagggtgaaagagaatcattgtttacttatgctccattcttcttaatttctgatattcttttagacaactgccaagtccatgcagaaacagctcttctgatgtaataaatgtagactttgatctgacactcaccaaagccattctgaagaatttcagagcagaacaacttgagcaacaagtcataaaatagatgtgagccttgactttattttttttaatttaccaataaactaggtctcaagagttaaaatgagctttttttccccagaagtaaacacttgtacacactttaagtgacattttttataacattcctttttttttaggatgagcatagagttaatacccaggagcaaacgcatcactgttactgtccttagaacatgtgctgatcacggccttggctgcacacagataaccctgaaacagactctttgatctcgcttctcccagtctgtaactttttttttttttttgagacagagtctcactctgttgcccaggctggagtgcaatggtgcaatctcagctcactgcaacctccacctcccaggttcaagcgattctcctgcctcagcctcccgagtagctgggattagaggcacgcgccagcacgcccagctaattttgcatttttagtagagatggggtttctccatgttggtcaggctggtctcgaactactgacctcaggtgatcagcccaccttggcctcccaaagtgctgggattacaggcttgagccaccatgcccagaccccaatctgtaactttaagtagggtttccaagtcacctgggccaatgcctaaaatgcctgccacttgaggtgcatataatttattgtgccaaccaggccactttgcagatggagaggggtgttattcaccaggaaaacaagcatttaccttgaatagcccagaccagtcagcgtgttccaccatcccaccctgaaaaaaagatggctacatcagcgttgtgtgtatttccaccaacctggtggagacctctttattcagggtaatgatacaggaaaaagggcagggagcggtgtcctgtgtgggccagcagtagcctcaggtccccccactccagggaaagcagagcaattgcagagtcccagagactgtgcctgggacccccacatgtgggaagacccacccatattccctggcattcatcactcggtcagtttccccaaacactgacccaaaacccactcttgcaacaatatttatgagcatactttctctctctcttgctttttgacatcaattaaatgaagtattggctgcaactagtttgtccagcagtttctatgtcagcgaatgatctgggtaaggagatgactggataactcttcaccttcattttcagctgagaaaatgccagtttaccatacgggtcacattcctggggcccttggctaggaaagagtggctccattttgcacacctcccactgtttctcagtgtctacaatgctcaaatatgtgcaaaggagtagcactgttattcacatcataatggatactaacaatagtagctattacgcgtgaagcacccatactggaccaagctttgtaccaggcacttacttataacactctcataccccgataatgaaggtatatcaatctccagcctacagagaaggacactgaggttcagagaggctaactgtcttgctcaaggtcacacagctcagcagtgctggtgttgacatcccccagaatctgccaaaaggtgagaaatttcaagtcacacatttgcctttaaaaatcagtttgcctcccaagtagccttgcagatcactgctattggtgaccagactttatgcaggagacgagaaaacaggtttatgtctttctctgtccctgaacattggggagtgagttggtaaagagcatgtaccctaaagagtacagcgtttttgttctgccatcaatgagtgtgctctttaaaatatcccatttattcaccaacatggtgctggataggtcaaaatgcaaaactaagaaagacagcacaggaacaatatatttttagtgccttttaattgaagtaataatgagaattgtatccacagcatgctccagcaggtttgcaagatgtaggtgctctgcctagatcctctgtggacactgcatacctgagggctagacacgttctgatcatgcctgctaagccccaaatcacaaaggttccccaagtaccagcaacttggaggaaaccctgggaagaacctggctgacatccttagcagaattttctgggttccaacaactgggttagcagaattttctgggtttctctatttcccttccattcctcctctctgaatgagagatcctacagagtgaatatttaaggctgatgttttccacccagtgtgctcctgcagcttagaaatggacatcacggcttgaaagaccagggaaaataaacatagggccgaattgagtgagtcctggcgtgagtcaacatggatgccccatcctcccattctgagcacaaagggtgcttaaaactttaatgaattgaactctatgagtaagggatgttaatcattttaattacccagcagcttgaaatcagatataacagtccaataatgtatctttaaacgaataccaccctgccctataaaaaatcccttccaaaccattctaataatttctatttatcttttctgacgttaactgttatccagcccagccggccaacagacagccttcccctcacatttggtttaaatgcaatgccgtctagtttttcaataccattagcgtccccctggtgggcagagagcaaggcagtggcaccggtcacacttcactgctttatctcatatgacaaagagcgatgatacgcttcaatccaggccagcccggcagagggaaggtggccacacagaactccccttgctgccgagaaacgccctctgtgtgacttactaacagcatgaaggggcagacaaatagattttcctctatatttataaccagcatcattcttcctttcagggcgttcagtgcaggtagctgttttatatgaaatgaacaatctttatagacgtaccagagccataacaagcctgattttcagcgaagctgaggtatataactcttaccgaattgtcaggctgcttgctcaacaaatcaagcctaacttatgatgtttgcagtgtaatttttattcctgtttgactagccaactacccagtggtaataggatgttaggaagggcagtggcgatgtttgtgcatgccgtgattgataggccgactcggcatttttcatttatatctccagattccaaatcagttaagtttaggaaaaatgaaacaaagtggcaagaaaaatgtttgcagattgcagaccggcgctcctgccgatctgagttcagcccacatctgccgggattgtctggaaacattaagatatctaaatgaaaatcaatactatatgtgccaggcatttactaccaggaacaagcatcaagagacctgagctaatcagacttccagcttgtgcctcagccctagactgaaccccaggggtgtcctaattgcccagactaatcatagaagagttaaatttataaccaagaaagacatcttgtttttcttaccagtcatcatttaggagcggaaaggctcacctgtgaagtgggtgccagatgtacagtgggagcccccattcaagagaggatggcttctcacctgtcaggggaaaggaaagacaaatttactgtcagcagtaaaaccagtcaggctcattgaagccccaggtgggagagtattccatcagctcaaacacgcactgcagttctcctcattgaaactctccccacttaacccccatgttctggaacatgaaagccccttgcacactttgatccatggcctggtttttattttaaggaaaccgctcagaaaagcagctggcatcagtgacattaaaaatatatgtatctgtttctccctgagttccactctgtgcttttttgtcccttggagtctccagaggagctaataacacttggcgacatgtatctccctaatatactgtacaaacaagtcactgatattattcacactccaacaaactacaaagtcacacaatagcaattggacgagcccacactatactgctgaaaaaccataatgtatcaggggactggattcctaatatttgcattctagatgccaactgtgagcatattttgtactattttcaacaaattacaccaaaatatgcaaaatgtttataaggctccatcttctatttttggctccgatatatttgcaacttaatagtcctttagagatttgtttgtctccttgggagaaacaggaaagtgggaaatgaaaaaagcagaaagagagagggagaagagaaaagaaacgaagacactttgttcacgcaagttgagttctgcgagtttttcgtaaagagcggagccactctccctggagaccttcttcgacaagaaatttaataacattatttggattccttgtgtcccagatttcagatgtatttttaatgcatgtgtcttgaaacaaaacaaccattgtcaaatgctgtatcctcttctcaccagtttaaatggcttcctagacagcacgattctgggagcatcttgaaagtggtgatcaatgaaaaactgcgccttgctctctgtggcttcccaaggatgttcaccccttaccacagaaggttgtcagctctcttcccaggaaaggtgtctctggtccttgtgatgtgaacgatgacagcctcttgccttctgttccatcattattgcctccacgctctagcaactgggtgcaggcacacatctgtctttcttgtcttcaaccctgtgatatcaccatccctgactgcactgtgcctgtgtaggattagggctgatctgttcagcagaatccaggataggggagattaaaatgtacatgggttgaagagggcagcagttttcctgatgctggattacacagccaagttgaaaacttttcaatccagcttctcccactggaaaaggtgtcagacaaaaaactaatttttttctaacgttatgcctaatgaacttaacccagcttaacctagagattgggcctcatgcccttggttcctagaaccagttttcctaacaagactgaagcttcagccgaattcattacttactcagaatgaataaagccagaggaaaagatatttcatgaacaaatctgtgttcttagctgggcttcaaggtaaaaaaaaaacaagtgaaaaagagtgcctggcttcccatgtctttgtacacacagcaggccctcaaaatgcatgtgtaggttggataaaccaacacatggtggatgaactgggaagtcacttgagttggacgtacactcaaaaaaaggtaaagagaccaggcacggtggttcacgcctgtaatcccagtgcgttgggaggcctagcggggaaccaggctgggggacgagggtggggggatagcttgaacctaggagttaaagaccagcctgggcaacatggcgaaaccctatctctaaaaattttaaaaattagccaggcacagtggcacatgcctgtagtcccagctactcaggaagctgaggcaggaggattgcttgagcccaggaggtggaggctgcagtgagctatgatcatgccactgaactccagcctgggcaacagatagagaccctgactcaaagaaaaaaaagaagaggtacagaagcatattcaaatggagagactgaggcagaaaggagcctcaggacacatcaggcttcaggctttcctctaggaacactccactgctctgcacaccaagcttggaatcagaggcagccagaccttgatttgcccccaggacaaaagccaacagcctacggctgctgggcaggatgacttcaaactcattcctcagccaaacagggcctctcaggaaagcaggcttgacaaagctaggtgtggctctcaactcaggggagctgaagccttcacaagccctacgtcctgtgtcccagctccacagtcctcatgggacctgctcctgtggtcaggctcacgtgcacagtggttgctgtgaaatagcctgtgtggtgagaaaactcctggggtctcagctagaaacgctgactggggttgcagcttttccagctgtgttgatggccaggctgggaagcctgctagaggccagggagcaaggcagggccacccagacaaaacagtcagtggagatctcacccagggagcccagacaattcacaacagaaacagagctgctgcttcctgagggctttccacgtgccaagcactattcctggagttgtgtgtattttaacttgatcaatcttcaaaatggcccggcaggtggaccctattattagcccacaggggagatgagtaacttagctgcagtcacaaattgctgagggacaaaatcagggtcttgtccctgtagtcaggtgtggagtccatgcattttgcagaaggaagtctccgggggggctcaggaacagaggccctgcctaagtaggtaagatggcagagagtggacccaaggtagaaatcagatcatatttatatgattcataagataaataataatactaccataaagccacactcaacaaaaaactttaatatggaggccaagccagagctgagcttccttaagtgagatccatagaagaaggaggctcaaacggaaatgcagttgaaataattataagataatcacttgggggcattcggcagtgggactcacttgggctttatcccccgttctgacactgaccaaaagaaacagcagtcagttaccaatggctttggcttcgtctctggtattccaaaaccctgtgctctgactgtcatctcacaatcagaaaaccagaaagacagctgcttgccactcccagagcctgcctgcccagcgccctggcctcctctgggaccacctgtgcacccctacgtcaccatcacagcccagcagagtgaaacttcatcagcaatatttttcacaagacagaggccacatttgtaaagtgacccttcttctgccttttggctctagaagagaaaggggcgagagagcagaggaaggacgaggggatgttcaccctgcggactgagtcaggaggaggacgtgacttgtttaatcctaataaatcagagcatccccgggaggtggaagcaacaggggttggtgtgccagccgcgctgcacattgacccaaggcagagctcgtggagaaatgatgtcctcttaagcagactcctggagagatggtccgcatttctcctgacaaattagaagcgccgtgaatgcaaccattcctcagaaaataggcctgatttagcaatgcacaagctgcattatctcgctgcataaaaagaccatttaagcagggaagcctttaggacactggccctttggagaagcagttctgaaatattacccacctcgactgccacctaagccagtcactccccaagggaaaagccacatttacaacctagaaaaccaagcaggctttagtcaaaggaaagggtcatttgtctctggtatctgcatgagatttcttgtgcccctgtcctgctcaagccctcacctcacctccagtggccaagccaagtggagagctactgtatggggaataccagtttcatcctatccaaggtgtgttgccctgttcatggcagccagagccttagccaacccgttgaataccagagcaattacaaagcagatctggtgacaacaatgctaaaaagttgaaataattcatttgcacaaagtgtgcatgtttgaaaacttttcatgcaaagattacaacctgtcattatcttccccagagacgcactaccttcttaaaaagtatctctaatgagatctacaaatctgttgaagacagcttactttattgtgtttgtaaagataaaaatgttttaaataggttatggctcctgggactgacagtcccaccatgagggtaaggtcattttgaaatgttaataaaagttttcataaaatatgacggcgctcaaagagtaatgtttggatgtaaaaataactataaaagtataatttctaccagggtacacgtgcagtttttctgtgtcaagatatttgcccaatttctcatttgactggggttgcagcttttccagctgttttgacggccacactgggattcgatccttattagagaggtttgcagcaggctttccgaggcttagccggttatattagactttcccttgaagcaaagtcttgcactgccctgaccattatgcaaatacgcaagcactcagcctaggattgtctcagcttgcagtagacatcgctgtcctcccaccataggagcaagacaagcaagactggtaaaatcagcagggagggggaccctgggggcgtagcctcatagctcccagttcctgggctagtcagggggaacatgccaaattggaaacattcagctgtttcctattcaatgagctccttcgtatttgaagttaaccagcccaaaggaaatatctcagaaggattttctaggtgatgagataactaatgagaccaatccgtcctctctgtttgccggatcccattgactcaaatcaaccccgatatttctattaaggcacctgggacacgtggggtcccccaggacccaaggttgggaacaaaactccctgcagacagtcagttaggggaaacttaagacatgctggaatcagggatcatggatttgggacaagaaagagatggcatcagagtcctacctacaaagtgtcctggttatggaacattcagcaaacgattcctgtcctcagcattatccagaattttaggtactgatacctaacacatataattgtcatggacataaggggacacactccaccttcttcatcctcttcccattctcctacacaccccaaggaacattcatctgagacccaacagattggctgctctcctctccaataactataacatgcgacataaatgtgaggccctaagcacttcaggactattacccacaaaacctggccctgacaaataaaaatgcttttgactgtttgagcccaggagtttgagacctggctgagcaacataggaagagcctgtatttacaatataaaaacatataaacattaggctgggtgtggtggctcatgcctgtaattccagcactttgggataccaaggcaggcagatcacttgaggtcagcaggtcgaggccagcctggccaacatggtgaaaccctgtccctactaaaaatacaaaatatatatatatatattagccagcatggtggtacatgcctgtaatcccagctactcaggaagctgaggcaggagaataacttgaatcaaggaagcggaggttgtagtgagccgaaatcatgccactgcactccagcctagatgacagagtgataccctgtctcaaaaaaataaataaataaataaaaataaaaatgaattgggcatggtggcatgcacctgtaatcccagctactcgggaggctaaggtgagaggatcacttgagccaaggaggtcaaggctgcagtgagccatgatcatagcactgcactccagcctggatgacagagtgagaccttgtctccaaaaatactttagaaagtattggttctgctctatcaagattctcttgaagcagggtagtaggatgccacagctcctgagcttgaaggaatttggttggcagggggtcagggagggagaatcatgtaagaaaatgagggatggaaacaaagtttggttaatgtatcaggttcgggagaattgtgataaaatattctgagatggtcagaaaaccctctctgggggaggtggcattgaatagagctatgaatgacagtctcatgtagaagaaccccctcattctctcctgttcaccttcacgttactctgctttctttttcttctcagcactcatttctccgagatactgcaatacagactgatgtatgaattctcactgcacccccagtattagaatggaagctccatgagggaaaagacattgccttgttcactgcggattccaggtacctaaaccaattcctgacacaaagcagtggttcagtaaatatttgcgaataagcaaataaatgaatggatcatgtaaccaggacactgaccaactctctggcttgcacaacgctaagaagagacttaaagctgatggttaaatcttcttgtgtctgctcatcaccaaaaggacacctcttgtgtccagtgtctggagggaaaaattcaaattcaaatgcggaacctgcttgcaaacatagcattgtctgtgatgtggtcctgtggagtcaatcaaaagtcctgttcagacagctttttgctgtgttcatcctataaaatttcagactgaagcctgactgaaaaaaaaatgcttaagagatgttggagtcaacaagatgttgaatacctcatggcagtggtgaacttgctgtaagcctatgagcagaagttcaatccaaggatggatgcacacctattaagaatgccttggggctcagtgcggtggctcacacctgtaatcccagcgttttggaggccaaggtgggtggatctgaggtcagaagttcaagaacagtctggccaacatggcaaaaccctgtctctactaaaaatacaaaaagtagccgggcgtgatggcgggcacctgtaatcccagctactccagaggctgaggcttgagcctgggaagcagaggttgcagtgagccaagatcatgccactgcattccagcctgggcaacacagtgagtctctgtctcaaacaaacacacacgaaaaagagtgccttggaaagaactccaaaatgaaaatgagtgagaggtcagaaattagaacctaaggttccttatgactttgacatgttacaatctgtggtaggcagaataatggccccatcaaaatgttcacaccctaagcctggtcctgggattctgttaactcacatgacaaaagggactttgcaggtgtgattaaaatgtaaatccttgaaatgggagtttgccctggattatccaagagggccccaaattactacttaaattctttaaaaaaaaaaaaaagactcttcctggctttgatcagagtgaaaaatatgaagtgtcagagtgatgcgacattgtcagctttaaagatggacaaaagggccatgagtcaaagcacaagggtggcccctagaagctggaaaacgcaaggaaatgaattctgtacttgagcctctgatgtggtttagctgcgtccccacccaaatcttgaattgtagctcccataatttccacgtgtcatgggagggacccagtggagggtaattgaatcatgggggcaggtctttcccatgttgttctcctgatagcatataagtctcaggagatctgatggttttataaagggcagttcccctgcacatgctttctctcttgcctgccgccatgtaagatgtccctttcctcttccttcatcttccgccatgattgtgtggcctccccagccatgtggaactgtgagtccattaaacctctttcctctgtaaactacccagtcttggatatgtctttattagcagcgtgagaacagactagtacagcctccaaatggaacacagccctactggcagtcttagtccagtggtacctgtgccagatttcaaccaataaaactgcaagatgataaacttgtattgtttaagccactgagtttgtgggaacttgttacagcagcagtcgaaaactaatacacagtcttatgatttcttgtcccaaacaaggcaacattgtttatcagaaaattcctgatcccaaggttattccacttttgacctccagcatgataaaaatgagtgccatgaaggctggtcttaccctaagctggcaaagtaactgaagagaccagaagagaacatgtcaagttttagaaggggcattctgacccaagggagttcagtattcaatttaaatcctagaaagtatgttcttccatagaattaaattttaaaatttaatttaaatttacaaatgaaatttttcagagcaagaagccaaattgggccaccctttttcctcctttttagattggtgagattcaagtgactcccctgcgttcacagcccacacagccacatgtgttgcttaagataagaagatggaaacatcatatctgaggtggggactaggctggaggaataagcttgcaggaaaagcccattaattcctctgcagaaagctgtccttctatatttcttgaatcaggacaacagaataattccaccttcagactttgaggaaggcaatactataaaaatccatcaatttccaggccatatttgtatgggaaacttatttttgtcccaactcccatgcaacaggcctcagcctgtccattttggaaccacagcaaatattcaaacatgttgaattggaaaaggaataattgtcctaccttgtaactcactatgatttaacgtataaatgtaatatccttatattatttaatatcatctgcatgtcttccatgttgggaaacccaaggctacttcatcaaacctcctgcagctttctcagactgggacccaaattgaacttctcctattcaagatctccagcttctccccattactcaccctcagtcttcttcctagcaaaatggcctgagtgtacacacataggggctggggaaaaatagaatccaggcccagatccagtctgaggaagtccacctaacggtaatttccacatccccaaaatgtatcatcggaatagacatccttggaacttagcagatctccagagtggctccttggacctttgggcaagaaccatcatggtgcagaaggtcaagtggtagtctctcaagttgttcctgcaccatccaacatagaaaatacgcatatgatggaagggtggtaggttccatcataccgcattaattcaccagtctgattcctacaaaaacaaggtagatcatgaagggtgacagtagacaacctcggtgagatgcatgccctccagagggtggcagataagccctaagaaatttcagagacccaccaagtcaatgaagtttttgaggatccaatgatcaaagacataccagggacccggtggggtggttcacgcctgtaatcccagcaatttgggaggccaaagagggcagatcatttgaggccagaagtttgagaccagcctgaccaacatggtgaaacaccaaccatctctacaaaaaaaagaaaaaatagccaggtgtgacatagcctgtagtcccaactagtcaagaggctgaggcatgagaatcacttgaacctggagctggaggttgcagtaagccaagatcatgccagtgcactccagcctgggtgatagaaagagattctgtctccaaaaaaaaaaaaaaagtacataccagaacatcccatctgtagggaaggacacctcacatttcacactgcatctcacatttcactttgtcagctacacctctgtgggttctggaagcagctatcccacatttcagaatattgctgctatccatgtactgagtgacaggagtgtcttccattgaaaggggcaccaatcaggagaggtctctgcaacttgaccaagacctggtgaattcctcatgacccagcagacacagggtcactgaggtggaaaacgactatccagaatttatgcagtaagaaagtatgcaccatatgcaaataaacaaaacaacaacaactcatggtttacttgtgggccctggtagagacagattttccgcccacggaatgcctagttaccacccagttaccaaccagtaggagctttccatcatgaactgggttttgtcagagccaccaagttataaggtcaggtagatccagaacttatccattgtaatatggaagaattttatctagaattggcatgagtaggaccacagggcacaggtaggctgcatgagctggtagcccagacccctatgacacccactactgatccagcagcacctccttcctcagctaacacctgcggaaccctggtgacccctctaagcagctggtggagaaagaaaaaggctaatcttggttcttagctcagtgtgtgaatacaagctgcaaacagacccctgctgtgatatacagtcccacagagtcatggctttgaaagacagtagttagggaaaaattcttccccatagccgaccttcaggtggtgaatctggtaatttactctgtatggaaaaataagtgggctgacataagaatacatgtagagtcatgggtagtagcaaatggcttggctggttggtcaagagccctggaaaaggaacagctggaagactgaagacaaagagacctgggaaagagaggattatggatgggtctatgagaaggcacaagtgggatgatccttgtattacacaataatgccattagggagcagtcatcatggaagaagcagtaaacaatcaagtagaaagaatgactcggcccgttgatatgggactaatttctgtcattggtcattgggcttgcacaatggccacatgaatgcagcaaagacctgatagcacaaacattatgcatgggcccagtagcatgaacccctattccctaagacttatctagttcctagcaccaccaaatatccagcttgccagccacagcgaccaatgtgttaatccctaatgtgacttcataccaaaagaaggctaaccatccacttgggggcaacttgattacactggatcccttccatcttggaaaaggtagggattcaaattgataggaattcacatactctggatttaagtttgcctttcctggccacaagtctttagctagcactactatccaagagtttacaccaatactagatcccacacaatgttgcattgtagttagggaagatgtaagagttgaaatatgaccatgagagtggaaatatgaccacgatagagccacactggctctatcacttatcccaacaaaaagaaaactgccaactcggtagagcaatagaatggccctttgaagattcagctcgagcaccaacttggggatgatatcctggaagaataggacatccttctccagaactcagtgtaaactccaaaacaatgaaaattgtatgtttgtgcatccccaacaggtggaatacatgaggtcaggatccaaagggtagaagcaggagcggccccgctttccatccttcccactgatccatttacagaagtagtgcttagcatcctggtaacgccaggtgctgtgcatctagaggttctgagtcctggacaaggcactcttccaccagataacttggcaagagtcccattatatttttagctacagttgtcatctgttcacttaggattcttatgctgagaatctagcaagaaaggaaaggaggagatagagttgttgttacatgatggaggcagccagctgatccactagggtaccctttgtcactggggccctatcgtgaaaacagaacgaatgcaacagccatgtcgagaagggcatggtgtccagagcaccatacactttagagaggagggcttggtcactgcaccagctgagcagctcagaccaatagaagtgtcagccaaggataagaagcaaataatgacataagagtatatagagaatcgtggggagtagcaaatggcctggcactacagaaagcagagatgatgagtaatagatgtgacccaaagaccagctgcaggggtgggattgtggtttgtcccaatgacactcctcttataagtctcccctgaagaaaagaaacaaccaagatcctggaagagctgcttataaaatttattatacgaaacaagtagttctacataatgcagggggcagactgtagtgttctctgtgtgccactaattccagctcctgagagtcttggtggctggcagctcttaactgagttccctcttgaaaattgtccttagctgaagagaacagccttattcaagattacatctcctccccaggggcagccaccatccaatgactggttgatgcactggggatctggtggtttaaagccccaaactccatggcaggacatttctgcagagccatgctagctccagcatgtaccatagcatttgttgaggcctcttctgcaactttatgatggtgcaacttctccttatgcccagtcttgcttttctgactcttcacagctgttgctcctaaaagcatcccccagggaacactctacacaaatttctgaggctcggcatctgatttcttggaaacctgacttaggataaatacttcttttaaaagatggatctgtttgtgttgccatatgtacacacacacacacacacacacacacacacattccaaaacccttcctgtgttctgttcctctgaggacaaagaccaaatgtcttaccctggaccttggagtcctgtttggtctggcatccaccaatatatctctgcagctcctctccccacaccacttccttccatgctctctttcccaccttgcactggccttctttgagttgcctgggtatgacaggctttctcctgccccggagcctttgaacattctgattcttctgtgtagaaagacctcgtaatctctattctttatccaaccttcagaccaaatgtcttcttcagagaagcctttgatcttccccagatttgatcagattctctgttatgtggactcataacactgtgtactctcattcatagcacttacgagtttgaattatttgtttgtgccactggtggattaatgtctattttgctcaccattatagttctagcatttgtaccatgccccactcctagctgacaataaatagctgttaaattagtgactaagatgttaattctcctaacccagacttaaacccctcaacacaaaaatacagcctttttcaccatactctgtcttttgtgggtattctccttgcctagtgacttaaaaggtagttgcaggggctaggacacagcaggacctcaatgaaccagccctgagtttacatcttaggtaattaacgcatctatgttttctcctgttagactgtgagctccttgagagaaggcgttctctcttgcctaaacctcaagccaggagctcagcgaatgtttatggctttaaatcttcaggaagtatgaatgtaaacatctggctattttgaagtgtgtaggtggtttggtttttacttcttccagagagtttgcatcacacaggcacacaaattgctaacatagggtgttagaggtcctagggtgccaatcggctcatatttactaatcatagtctgtgctccataggaccaaggaaggagtagctctgagggaagtgtgcccctggtattcgccactgtgctaaattcacaagtgtgccagagaggtctcagagcaggaaagctgtccagtcacacaaatgccgcaatgcactctagtatagggctgacaagctcaaatgcttcttaggctgaaggtgaacaagtgagggaggatttcgcccaaagcaggcagcagggacttcacactggctagatgctgccatgcaagataggagccctgtgttgctagatattctgattttttcaagagaatccagaactggattgctgtggaacttgcccagctttatatttgtcctcaagaaagaaagaaagaaagagagagagagagagagagagaaagaaagaaagaaagaaagaaagaaagaaagaaagaaagaaagaaagaaggaaagaaagaaagcaacaaaagacattgtgctttccaaacaaaatacacccaaaccagagccaagttcatgggaagctttgggttgaaagtcagaatatgcagtctcttcaaactcactgcaagaccaggcacgtccctagaaaaggtgtgcctcagtttccccatctgtcaactgagtcatttgggccagatattccagccgtcacattgtgggtatccttctggatgtgaggtagaaatcctgctccctgcctggcaattctctcaccccaaaacaaatcattttcatttacaatttgaagccagtgactagaaaggtattttgccaggatttccatttctttcaagggctaattacaaaagacaggggggaaagctctcaccatgctctctttcacatctcattacatttattcagctttattactaatgctttgttcatataattttcaccctgggatctacacttttgtgcagttaccccaagtcagggaacccgccttaactccagaggtcttcatcacctcctctggtgttcttaggattttaaagtgacaatctttgtgttcagaaaagctttctgagcagagtgtttttcaagagcatgctgtcctgcccaaggatgaggctgccatctaaggtggtccaagggacgcctggggacttgctcccaccatcaccaagtccctgtctcaatccgggatgcacagacgctcctggggtggcctgcgttttggaggctgcccaggaggagccggaggaaatagatggcttccagagtcatcctaccccgaatctggactagaagctatcgtgttctcctgaaactgtccagccccttccacagatcgtcacacaccttctccagcacaccacccccggccacctccacgtgttagtgggcaaagccaaggctctgattttggaagctcgtctcggattgcttcacatggattcaggaaacaagtcccaaaagaagccaaaaggaaaactacaggaaatgtgcacaccactcaccatgaaataccaacccaaaggacaaactcggtaatcccaccaatgttgtcccaaacccgtgatggctagcagccgacaaatacccgcagacctcaatccatttttattgtattcaggcctcagtgttgtatttcctgcctccccttagcaccacacatacagtgtacttgaaaacaaaaatctataatattgatcccgcaatgtcaccacaattattcttttgaaacagccattgaaaacaaattacatctgcactgccttttcatccgcccgctgcgagtgagcaatgctcactgcggtctccagcactgtggcgttggcactgtgtcaccgccgacaggacagcccagggaaaggtggctggggggggggggttcagaatgaaaaccagagcgaagggccgatttaggagggcacagggtctctgcctggccaggcagctcaggaggggtctggatccaggatggctgcaaactcggtcaatctgagaaattctaggtcttcatatagggctactgtcagggcacaaggactccccagtagaccaaatgcggtagttgggatgattaaatcaacaaagatttagccaaggcctttcggatactcgctttaaaatctaatgacagtaagtgttaattgaagcaacatggtcgtcatctgagagctcgtaattctaccgacaaattaaacctccttaaatagaccattgagctcaaagcaggagagatgcccatggtcctagctgtctgccacccccaattccaactgacttcaaggtgaccctcctgaagaaggccatgttgtccttttcttccagcaagctgcatctccagagcatccagaggtagcagagacctcaccagtcgcctgccatcctgccacagagctgaggattggcacaaatgtggtgccccagaccccagcaagatccctgatcccagctgtaacacaccagccagttgccctgagaatgtctgtggttgggggcctgcttgtttgttttagattgtcatacttggaaaaattctctctgtgcaataattaaattccatgccaccgagtggtgggcaaagggaaattcttttgttaaggtttgaccacacaagtcacagcggtggctctagcagccgggaagtgataactttggagcattaaaaaaaccaatagccttgttgacatggacatgggaacctaacccctgaagcctcctggtatgacgcattgattttcctgtccgtgtacagttctaaagccatccattctgtatggtcaggactcaaagggccagagagagggaaaaaatctgttcttgccgctgtacctccaggcaaagttgagaaataaattctacattttgagagatgatttgttcaagccatgtttaagagaatatgattgcattaaaaaagggaaaaaatattttgttaccctgacccccgtaacctgtagccactgatcctcatgcaaaatctagatgccatggacagcacagtgtagagggaggatggtggtggaagggctgaagagggcgtcaggaactggggtgctttttttataattctccaaataatatcaccaagctgccggataatttctcagataatcctagcatgtccacctgtcattgctccgaccctctgctactgttgttttgcaagaatgcttctcctttttgttcaagggtcccttgagaaattgccacattccctgcttgctttccaagcctctcttttttgcagctaaaacaggccaggcagctcactcttcagggtctgcctgagaggcaccccgacctgctgtccccatgccatggcagccagacaggacaaggctccccagagagccttccagcccctcctcccttcttctgtgcaccatggagtcctcattcaacatgtctctatgtgaccaaaacccctccctgttctcagtagtgatggggagagggatgctgggtgaaggagagagagagagcccaggctatggggaaatttgctgagacaccgcaggggattccatgtgcggttggcttcgcatgttcagtactttttgagtgtttagctattttagttccaaataaagaaaccttcagtgccggtcaggaggtagagctcacagaagtagaagactactgtttgagctgcaaatttgcagtgtcgttctgcaaagtattacatacatcatttcctggtgcagaggaatattgagctatttcagtgaagccaaaaaggaaagaccaaaatcatgcaattttcctgacctagacagaactacggacggaatacagaaatagcaaatgctaaaatgaatgttcttacaagatctgtctatataaacatagaatccacatatcccaagtgtatgcaatgtgaactcaacatcagcatgcatgcacactagttaaagtcataaacccagtcacacaaaacattcctaccagatgattccatcttgccagacctataggagtattcctaaattaggttggtgtgaatgtgtttgtatatttattattaaaatacttactgttctgccttttgaagtagatggacaaatgatttaggagtgtaaatagactagaaacaaaattaatgcaaataatgtgttgatttttttttagcttgattagccaagccaatggaaaattctagaaaacgtatacaattattttaactgtcacaggctggcaattgtaattgacatgatttgtacgagatgcagtgtaataactgaatatattaaaaaaaaatctcatgccttgattaccaggagaacattactagtgccacaatattattaacaacacaattatcgtggcatccccaggatacgctcttagcacttcaatgcattagtgaacctttgctaacgaagaaaaaattaaagtacagcaaatttcaaagcaccagttgtacccaatatcattaaaaatttataaaacttcccctgaacatgacaagtgtttggtttaaatgaagatcagccacaaggagaaagcagaaatcttgttattctttgtctcctttcttagcctccctctctccctctctcttttccccaaacctcccccaaccagcaccacctcaatccagctgaaatatgtaaccattacagagtgacagcttgacacacaatgacccgtcagaacattcatctcgcaatgttttattttagtgaggagccaaactgcagaaaaaataagcaagttgtttcaaggcttggaaggagatcaaacatttctggcatccccacttaccagacctttgatttacaatggacttgtcagagcccgattagacagtgtgtgcttaaaaacctacagaggctcctccatgccccagcccaccaccatttcccccaccaacagcatgcctttgttccccggaaccagcaaggcaggctaaacagagactttgcacccttgcaagaggaccagggaccacgtaaaagccaaataggctgcaattaaattcttcttgccaaggtgaaaaaagaaagagagggtcagagatgtgggggagacaggcacagagagaggcaagagaaaggagagaaaaagagaggatgagaggagagaaaagggatgaagggagaggagaaggtacaagctgagttccttctgctagtctctttacctctccttccaagtcaaaagttatcatcttccccaaaaaaaaaaaaaaaaataccctgccattcctaccaccagtgagctttctcaaccttattcaaacgagaacactcagcttacaaaaaaaatgaattggaccaaaagtgcaggtgtgtaaaatatgttcacggtattacgatttttgctagtaattacaactatgaaaatggctggaaatatattgtttcaatttgtatggagaacaattgcagggagagagagagcagtgtgatctgtgcctggcattggaatgtataattccttaaccctatatggcagcatggggcttgctggagcaaattatgaatacatgtgtttggagagtctgaatagtaaatttgggttttgcacatccataacaatgcaatctgacaagtgtgatttatggaatattaagttaatacagtattatgaaattagcttaatgtactaaagctgtaattttaaagtgaaaaacaatgcaaccagatgtaaacaatatcaacattagcattttgtgaaagctgaaaccaactcactcaaaatgcgtctgtagagtcatggagttacctcgcccaaccaggcccaagttgttgaaagtttcagacaccagaataaaattccctactcagtaggtacagctgctttctctccacccaaagcctgctgtgcccgctgcaatattattaaccacaccacccccaccccttgggggaaatcatcagaaattattctgagctcttcagactagaggaactggtgataactctgcaggctgagctcaaagggcctccctcctggcactgcctgcctcacccacaataaccctggagttgaactctgaggagaaagagcttggtgccagatgcaatcccaggaactcagggtttcaagcctgcaatgaaaggaactccaaggccaagcaaaccgtgtcgatgtaaaacagcaaatctagcagcgtagtcctaagactcctcagaggggaggcctaccaaagccacagagacttatgacataaaagagaactagaaacctttgggctacatcaggataagccatcctgaagcgcagtgtggctgcgtgcgggccagcccaagatgacagaaaccggtgagcatgcacacagtgggcttcccctgggctctgctatcaaggactacaggccaaggggatggatttgggccagatgaaggttccccactgtcccctaaccctctccccaatcccatttcacctctcatctcccaaggacagaggatttattggaacagtgcctccaccgcagacagatgtctgaaactccaggacagaagggaatgttatggtgcttgaacagtgtgaagaacccattagaaaatatttccttggctgtctttgctttcaatcgagattgctagaaatgtcatagatttaaatgagtggatatgtctggaacccaaacatggccacccttgggcgccattttccttccctgacccaagcatgctaccccttggagagcaacagggttgtaacccaaacacagatctccgcagatccttgaggaaataagattaaagcactgttcctgggttccactggacataagggcctggtcatcacagtttactcagattcccaagacttaggattaaataaagacctctaggaacagagaggcaaaaccatacatattggttcctgccatattgttgaatattaagcttatttgatgaaagacaggattcctgtctgggaccaaaaccagattcatttctctaggaagatatctcatatgaaataccttatggacttccttggcaaaggtcagaccccaaatcccatgctgtggtgacctccacttcagagaaggcccagtgcatatacacactgataaacactgatgttcgagtaagtatatccacattagatttttacagcattttctttttaagattccctgtgtatggcttaatgtggtaatcaggattatttcatttatctagcatgtcacagtgccttcctatacccatggtaaaaataagagcattctatttaaaataaaggaaaagtatatgtcaaagttagagatgaaacagttgccggagtccacactggagaaaatcaattcacaaatcttgcagcgaggttctgtgcctctcctgccttgcaaaggcgcccggctgttttctgctgtttattgggttttgtttttaagatgccctgcatttataacaggagctagagaaccgagagctgaaagccaatactaatgttttaattccatcaagtatgtttcaattcctattttgcattttgcattaggcacccggactcagtcaatacttcacagcaccgtggcttgcagccgggcacaggggcttcacctaagctgacaaatgattatgcttcacaacgtgaggataaacagggcttagagtcagaagcctgctcattgctctttcctgctacaaagaacaaatacattgtctagtcacaatatgtttatttaaagagaccaccgtgtaagttgcttcttcatgtgacttccttttcaggaagccacctttcttcctccaaaattattaatctccaaaaataacataatcctccatgggacagtgagatgttctacctcagtgttacaacccaggaaatggagacatagatggttagtgtcctaccacctctgtgagtcctcactccagtccgaggagttagtcaactctctcttttctcagctgaagaatgacactgtgggcagctttcttgattctgaaagataaagatgctacaaacttaaaaaaataaaataaaataagtatacgtctgctccaagctcaaattgctatttttggtcccctccttaaaccaggaaatgttcggtatcttagcctctatttttttctgcatttataaatccaaatattttaactagaaaaaaggggttgggtagtaacaaactctgacacaaagggtcgtcattaaaggtcctctaaattcaaactaatataacttttaaaaaattacacaaataaactcaataaaaactatacacaatacacaaataaaaagtgtggggatgggggtgtgtgtgtgcacgggggcgtgcatgaaacagatgggcttctcgaattctctttattctaataagacttatgaaataaaatcagaatagatgctttatctctaaaaagcagttttttgataaacctcaaaatcagtcctcatgttcctacttgcgtcacacagtatcagaccagaccttgctaatttctctggaggagtcaatgattcaactccaggactgacagttgtataagtagaatctttctgaaaatctgcctctcaattgcagtcacaggagtaaactggtttacttgttctaagaacagtggagcaacatctgtagctcagaggtgagaagcgatggaaagaaaaataccctaagatgggctaaatgtccccagacccgaaccttaaggcctttctctcccggcaggtacatggccccactctcgccccacttagcaaattatgtataaatgaattaccttcctgggctggttccctctgaattactccttggcttctgagtggttttccatcaggacgaaccttttcctctcccttatgcaccagcaaacatactgatacaatttaaaggtcatgttcttttcaaactgacagagccctccaaagttttgacgagaggccctccaaacctcacaccctacaggcggaaaggaattaagtaaagcatcacttgctggaggctcaatcatgtgaaatgattagaaaacgcatccatggagaagggggcttctcgaggtgactggctgctcatcccgaaaggagatgtcacaccgcgaggcagagtccctgccactgggggtaccccaggagggtcaatgaagatataattactttcccacaagaagtctcttcttttcccagtccccagtggatgtcacttaattagcctcgccttttttatttgatgatagtccacctttccccccacaccccaagactgaattaatactatcatttcttaggcttagaaggacttttacttgataactacggaagcaccgagaggatggattctgcataaatgtgcgttgtgtgtagacattgacatgtttatttacaggtgtatttgtattaccaggaggatagacggttcgtggtgtctttttctctttcttttttctattttttttctgtctttgggacaaaaagaggatgactgaaatggcaccatgttgttgatggcatgagcagatgctgccttctgggaatccaaccatggcactggacattcttctgatatcattattattattattatttgacatttttgctttgattactttgttcatcttaaaactgccaaggttcacctgagatgtgacacttgcttgaaggtccgagaatcaccagatgctctgtcttaaactgtgtacatgcaatgacattacctgtcacagaaaagggaaccttgatgaaaaccccagacagaaatgcaatgggtggctcacacgccccctaaccctgctgcagagttccaggcaaggccctttgtctcgggttctccttcctgcctggcttctcctgattgatctgagcatccctcctcaagagaagccctctgtaactctaggatttatctttgggctgaaaaaaatgatgctacctcaaaacacttatacaccaagaactgaaataatttagcccatggaaaacaaaataaaatccttgttttgtcatgatttcacatgcatccttaaagtcagcccagggcttgttaagtttttactggaatgactttgctttgaaacttccctcctgctttaattgacggatgcacacaagaccacagccttggttggccctgtcatggaaagctggggctgtgatcctggaattcagtcatcaagtagttttttggcattgttcttctgttgacttcgcctctccctgtatcacaccagttgtctttccaaaaggaagtgtccctttccttccctctgcaaaagacacaagctgctctcacccacttcctccagccatcggcacctctgttttcagaccagccctcatgaccccagttagaggtgcacagctgttcctgccagcccttcctcccagcctccttcctacagatgccaccatgactgtcacacctttaaggtctgtgtgtcctgtgaatacaggtctaacttgcgggacacagagaggactttgttgagcaggtggtccttaagttcaaaatctgaattaaggcatgtacagcagcacagtcatgggaaccttgttcagaaaccataaaaaatccacggatgttctcgtggagaccacacttcatgctgttaaaacttgaccatccaaatatttcctatcacacctttgcgtggtcttattgtgtgagtggaggagtgggggcaaggcagtcaattaaatgtggatcaaataatcaatcaccattgactgggcaccttttgttgcccagcactctagctattggctggaaatgctaaaataagatcctgtcccactctcaaggagttctccatgtgaccaatagagagccacctaaacaaaccattaattgagtgctcctcctgaacctgccacagcttaatagaaattgacaaggaccccatgagaatctcgaggaaaagcagcaaagattttggcccctctattttaactgggtctcttttttaagtgactgctgcactgagtcactaattcagtagaacgctgtgacaaatgctaggaccaacgcaatccagacctagacctctatctgctttcctcctagaaagaggagtttcaccttaaagcaggagggaaggtgtttcacacaagtgggctctttgcaaacttgctaaatcagtcttcctccatttctggaggaaaaaatctgcacggctgctcacaaatgccagaaagggaaagaatccaagaccttgaaatagctgaggctctttccttcatttaaaacttttgttcctggaagaagttgaaggatgttttataaatgttttaaatgcatcgttcaaaggcaaagctccttccttctctggggaggtgacccttctgttctctctgctgatgtcaggcctgagctgtgacctagagggacagcagggctggtgacgtctttttacctccacacccacgaaatggcgctctgtcaactgggggaagaggaacagggctgtggttgtttaaggggtcttaagaagacaaacccaggccacagagtttctacgttttaaacctttcactgcacttttccttattgtccacatctgccttttaaaatacttttcatggaaattttatctagctgttttcatgacaggcaaacccaccgtgcaacagccaaatctgaactaagcatttgaggaaaaacgttctcagttgtgtcaacggagaaatgatgaaatgaacaccagatcatgttagtacagcccgtctgtctgaccgacactgacagccccatctcttgaacacttaatgtgtacaaggcctgtttaagccaagaggaaagaactcacaggggtagacccggccttgaaaggggtttcattgagtggggctacactggggatgtgtctgtaccttggacaacgcttggctgtggctctgacacccagcatgtttcctgtgaccaagcaaagtgctaggggctgtttatttcacctgcatgcagatagcccgcccggacaccaccccaaaaggatgagcacaccctgagaccagccatgtctagaggccaacaggaaagggtcatcagaaacccactgttctggtgcttcaggataaatcttgcctatttcttcaaagatagagcatcatcgaactggatgatattttcttctcctttgcaaaagcaataaaagctgccggtctgggctgtgtatcctgcctgtgctgctaacaagacacattcctttttgttcatggcgagtcatgtaagtttctgtcttatgtcacaatttctgacaagtgcttgagcacaaaaacagtatcttggcaccaagaaaatgaccatcacttaaaaagatgaaactcccaaggacaccaaaagggtaagatttcatgggagatatgcaataggaaagccagcccctcccatgtccagaagaccatccctacaaatcatgtcagaatcattctgctcttatcaaacttcaaggcagccactgctgcaaaacttccctggttcaaaccaaccacttggcccagagttgatgtttaacacttctacacatctcatggttagcttattgggaaagcctgacttggtacagccctgttcttttttccactttttaattattctaattccttgtttttcttctaggtcccttagaagactgatttctcagccaagcatggtggctcatgcctgtaatcccagcacttttgggaggctgaggtgggtggatcatctgaggtcaggagttcgagaccagcctggccaatatggtgaaatcctgtctctactaaaaatacaaaaaattagccaggtgcgctggcacgctcctgtcatcccagctactggggaggctgaggcaggagaatcgcttgagtccgggaggtggaggttacagtgagccaagatcacaccattgtactccagcctggccaacaagagcaaaactccgtctcaaaaaaaaaagaaaagaaaagaaaactgatttctcagttcaggctatctcttctctctgtttgtaacacaaaagacttatgcctctgaaggacgttgtagagagaatattgcgatgggaaacatacaactttgaatttcattacatcacaaacttccttctcaaaaatataacaccagttagtttaataaaacatggcatctacggacatacttatcatgcagaggtgcaataagaaacaatcatattaactgaaaaccatggcttatttatgtattaaagtatattatgtacatctgcacccaaggcctctccgactcattgccagatggaaatggggaacatggtgccagccttcaccctacactgggaagttcttttccctgggcgaatgtatcccttctgcctacctgctcacattccaggactcctgccagtttacctacacccatctggacttagtgacaacatgaaatccaggctggggtatagcagagccctccctgctctgttcctggcctttgcattttcgagggtgctgggaacttatcagtctaaaatctatgatgattttatcatagtcactagaaggatccaagaggaagtgaaagctgaaaggaaagcacaagtaaaattctcactccaacacctgacccagaaagcctttgggttttgaggggtgagcatgagggggttgctggttcacctaagaccctctccattcaccatcacgtccctcggtctcccccgatggagctgtttctgagtcttacaaggcaaatattaatttggaagtcaaggtcctatttgcaaaagaacagacagacattctgagatcaagttcagacttaatatactgagtcttggtggtgttgtctgctgacaggatacactgtctttaatatctctgcttaaaatattaccaacaggctgggcatggagacgtggagtttgagaccagccctgagcaacatggggaaaccccacctttaccataaattcaaaaaaaaaaatttggacaggcatggtggcatgcacctgtagtcccagctactcgggaggctgagatgggaggatcacttgagcctgagaggttgaggctacaatgagccaagattgtgccaatgcagtccagcctgagtgacagagtgagaccctatctcgaatatatatatatatatatatatatatatatattccaacaacttaaataaataagacctagtatttgctagcacaacagggtgacaatagtaaaaaataattatttgtttaaaaataactaagagtataatctaactgtctgaaacacaaaggataaatacttgaggggatagataccatgtttacccggatgtattacacatagcatgcctgtatcaaaatatttcatgtaccccataaatacatacacatactatgtatccacaaaaattaaaaactgaaaaaaattaaattaaaaaaaattaccaacaatcagattaggtcatcttctgctctggctgagctatacccaagatagataaaacttcaaggcttcagagattcaggaagtgcaggcagctttgtggagaggcagggccgtgtcacccaaccatgcctactaatcaagagccctgactcccaccagcccatcctccctgttccactgcaacacctaactcagaagacatggcccactaaactgggcaaaacctaggtgcacatctgcacccaggcctctcccacccgtcgccagatgaacacagggcacacggagctggtcttcaccctacactgggaagttctgtatccctggaggaatacatccctcctgccttcctgctcacgttccaggacccctgccagtttacacacacccagctggatgcagtgatgacagaaaattcaggctgggctgtggcagagccctcctactctgttcctgcaggggaacatggcatagacccccacgacgagcagagccagcttccagcctgcacagactccaagccttttataaaatcaaaatgagcctcccttaaataagggaagcaagggaggggatttcagctcttcctttcccagagggctggagccgatggcctcgatgacagcctaggcattcagttggcttcgcctggaggaagagggaggcaaacgtgcctgaatgattctccccaggaaagggagagagtaggacaacttggggaaaaaacgttcctgcagggctgcaaaaatcagggagaggcggcagggcaaggagacaggcgtatgtatgtctgtgtctttcagctaggcagctcaatctcaggttattttatttgacaaataaaactaaactgcatatttatggactaatgatgtgagatattgctcttttattcgtatccactgctgtttaaagaccaactgtaaatattcctgggactttttgcaagttggtgtgacttaggtaggcagcccagagcacaaccttgcagccccattgacaatagcggcactgcctcaaggtcaaggtcaagatcaggacgtcacctcctttagcaaagtcagctactcattgggagcatttcctctcaaaagccacagattcacgtatcctttcagcaacactcatgcctggctctgtgctggcctggggctttcagagccatctggaggatgctgggccctagtcctgctggtcaaacaccatgaggcgtcagtgttgggggcaggagatgatggagtgtgatgaccctacccccagaacggggataactccccactcctctgtccttcgccatgggccagtgagaagccatcatgcagaagggcagtttgttggttgaaggcatacagtggcaaacataatgtgttctctgtcatttgatttaaccactcctgccatcaaaaataggacagggagaaggaagccaggtcaccttgtctttggaggaaagaaagagttctgggaaatagtaagacaagttacagggagggtctccatgggtccatgcatcttgcccagaggacagtgggctggtgggtgggagtgggcagaggagaaggccgaccctcaaacccagcagagtcaaggcagctactaggagagcacagtgttctcagacttcaagggttgctaaaggtgctgcctcccagctctctgcaggcctgggtggtcagagcaggctgtgtgctcagaacaggtagggccagcaaaataaatgctgcatggttgacccccgtgccacctttatgggctggggctgacactggggggtccctactgaggacaagctcagtttaggggaaatcccagccagacaaccacctggtaaataggaatagcccttatgtgggcttagagaagacacagatgagcatcattcaaatggaacctctcccctgctgaaatcccaccaaggctaagggcctgctcagggagtcaggcatatgttggtggggacagagggcttcatacagcattaatctgtaagaagctgccttcacagcagctcctgctcaagcattaattcatttttacttcccgtggtgataaagacacacctcaccattggcttttctaatgacagatgtcgtcccacggccctgctgtggtcctcaaagatttggtgcccacagccagggatattgctcccgcctctagccttctccctttgctcaccagtctgagtcatctcttacccagctgctcacccaaaactaaaaataactgggcaaatgcctaaaactgctcccaccctaacccagggctcctccaaagatctagaagaaaggtaggaagcccagctttggcctccatctccagcctgctgctggcttagaggaagatgcctgagtacattccatgcaccaagtactgaggggctacagagatggacatagcatggcctcggaactcagaaacaccacgcaaagccacagaagtgctgcaaagagggtgttttgtccaacagagtcacgtgggagagaaatggatcctgccagggaaactgagaaggcttcatgcaagaggaggtatttcagaggagcaaaacgtcagtagacaaagaacaaggagggtttctcagggaggggagctgtgcaagccaagctgcaggcacagaaggaagctgcagtctgtgaactctccatgagagactggggtgagaataaaatccagtgcagctccaggtggaagaccctgcctggcccagctctgctggcctcccagactcattttcaaccatgggcctctgtgtcctctaagcttctctcaagcttcctcctctcaccttagggcctttgcagattctcccactctcagcagtcctcccactccgggccttcccttggtcggctcccccggactttcaacattcaactcaaagacctcagtagagctgaccatcatgttcatctgagggattttcttcatagcacttcctgctctctgaaattatcttgtgtttgtttgcatggtcagcatcttccctaaagtatataacctccgtgaaagataccttgcctgttttgttcagaatcttcagaggctgggacaatgtccactcacaggaaaccctcagtggccatctaaatacctgatgagtgcatgagggcaggagggagtgaaggagggaaggaaggaatggctaacataaggtccgtcaaggggcagggagggaaaacagaaggaaaggcaaatgagcctctttgtggacttggtgctgggcactggaatttgtatctgcatggcctctctgggagtttgtaaaagcagtctgagaaactcagggaggtggaaactggccagggcaaagctgatgggctctgtgcagaaatcactgatcagccaggcatggtggttcacggctgtaatcccagcactttgagaggccaaggggggagggtcacttaaggtcaggcattaaagaccagcatggccaacatggcaaaacatcatctctactaaaaatacaaaaattagccaagtgtagtggcatgtgcctgtaatcccagctactcgagaggttgaggtaggagaatcacttgaacccgggaggtggaggttgcagtgagtcaagatcacggcactgcactccagcctgggcaatggagtgactccatctcaaaacaaaaagaagaaagaaaagaaaccactgataattttccactttgggatggggtaagccacagtagttgagacttcctgacctacacagagaggccactgagattctggagccgggcagttgatgaagttgaaaagaaatttgctctctgtgtcagtcgatttgcattgttataaaggaatacctgaggctgggtaatctataaagaaaagaggtttatttggcttatggttctgcaggctactcaagcacagcaccagcgtctgctcggcttcttctggggaggcctcaggaagttttcctagtggcagaaagcaagcggggagctggcgtgtcacgtagggagagagggagcaagacagcaaggaggagatgtcagtttctttaacaaccagatctcccatgaactcattactgcagggtgggcaccaagccattcatgaggaatccaccccccatgacccaaacaccctccaccaggccccacctccaacattggagatcacattctgacatgagatttggaggggggaaaaaacatccaagccatatcaacctcactccatcacaagtgcttgcaggatgctctacctagcattcctatgggagtcttctccaggcctccaggtgccagatccttctggaaaacaggctctggaaagaggctgtgttggcttcccagagcaggctgcagcacagcccagccacggcaccaaccccactgcacgtgggaagtgctagttcccagcgtgacccagctcagactcacagccccatcagaactggcacataccccaaatccatgtgagaacccagtgatagattccccagttcatatgagagcttccagtagactctggaaagtccgggccctccagagaagggtgatgtcaaggatgcagaggaggacacagggagagaagccacaggtctgtgttcaagctactgaggacccagtgggcaagagagaggttcccttgtgccttaggagtgagaatttccaggccacctgtggatgagttcacagcttacaggaatacctgttgggtaaagagtctgcaattactcacacttctcagccactctgagaaacttttaaccacaagacctttgagtttgagtttaaacactttcaagcttttttgcaatgttgggcaagacagaaccttccagtgacctactgtcttaatctgaaaatactgaggctgtcacccttttatgtctttggactgttgagagaatgaatgaggtcagtgtgcacctataccaggggctcagaaattcttgacccccagtttgtggtcattgagtactcatatcccttctcccgaatatcttttgtgcctctcttgcaatgtcctgtccgagaaaaacccagcgagcccttgtgtccaatggctgagtccagttgaacatcctcaagcaccctcatgacccacgctagctgaaagtcgaagccactccctgtgaccaccactcaccctctgccctctggccctggtcccctctgaccaccactgccccatgacttttttccttctctctctgcatttttaccctgatgaaattatttgcctatttcttcttcatcccagaagagtgggtgttggagctttgcaaagtttgcattataagaaaccaatattcggggccacagaacatcagaggtttggcccacatgacaacatagaaaattcccacccaccaggtttcctgcagctgctcccctcctgcaaggaatttgccaagggatgtcggctatagaaagagcattccagaaccacgatgatcaaagtttcattggacccaagggcacaaggtggagtgggaagggaaggtcctctgcagaactctttgtatttggaaagaagaaaccaccaggcaagactcccggcatcctcccagccagggagaggctgaggcttggggaagttgggtgtttccctgaggaagtaaaagatgaagcgtttgtgttttgtttgaattgataatgatgtcagtttcagttatgggctcattacaacagacttgggacgtattaacagctctttaattgaatttggaaataagaaggagggttttgaatggtcttataaatagtggatgtgccggcctctgcagcaaccgtcttcaacattaaacagggagagaggagacaggggatcccccaacgtcagccatttcttatcctccacagggtccccacatgcccactgtgagacaattgttatcattcctgagctgagcttgtgggtgctaaggaaggcattcggaccaggaagcccaaatttggacccagagagtaaaaacagggctggtgagatgtggagatgcaaccttttatcttctctttttttatttatttttattttattttattttattttagagatggagtttcactcttgttgcccaggctggagtgcaatggcacgatctcggatcaccgcaacctccgcctcccaggttcaagcaattctcctgcttcagcctcccaagtagctgggattacaggcacgtgccaccacacccggctaattttgtatttttagtacagatggggtttctccatgttgctcaggctggtctcgaactcccgacctcaggtgatccacctgccttggcctcccaaagtgctgggattacaggcgtgagccactgcacctagcctatcttctcttctaaatcagcaatgcaagataaactgctgactgtccagcccccagccccctcctataatctccacagggcccaaggcacacggtgatgggatggcctgctttcctatcagccaggggccctggccacctcctctaggaatcctgggtgcctgccccaggccctgagaaaggaaatctagacaatcctttgtagagtgaacaagaggatgacctaccacctttgggctttcccttttgccttttctgtttccctcaccctttcctcccttccacctgctttctccaccacacgctctcatatcaacccctatgcagcctcttccagaaaaatccatgttaattatccaggatacatccttctttatttactccatgactatataaccacatacaaatatgcatatttactcatacttgcatgcatacatatagacacacatatacatcacgtccatatgcattacctgtctgaggggaggggagagagttgacagattttgcaaataaaaacacaggacatccagttacgtttgaatttcagataaacaacacacagcttttaagtcatttctagattatttcttgtttatctgaaattcaaatgtattgagtgtcttctattttatctggcaaccccgggaagaaggtggctttatttttttgtaaaatctgatcacagtattcacacatgcactcttgagatcccatagctatctttccaggtcaacaggcagtgccctagtgcattctttttaatggatgcataatattccatgttgtggttattcctcaatttctggataatgcccactacgtttggttaactgtactgcagtgttgctcaccgtcaacaaaaggaacggaagacaatatggctggctctgtcatgcctccttaaattagctgtcatggcaaagtcagaccagaagtcacagcaagagaacacatcactcagaacagccagccccaggagagcctgtggctgcatcaagcaccctgagcggggaggagggatgacaaaaagaactgtgaaatgcccctttccaacaaggaacataacaatggaaacagagagatgcctctgactccaggctggaaatatgctcaaatgtagaaattcagaccaactcgtttgccaaaacccacaccagcataattattttgctcagctccccccaccccaccccaaactccttctttcatcagtcatatctttaacttcatccttgttgctgaaaacacaaaaataaaaaatacatagcagctctgttgacattacagcaacagcataagcctcattttaccaaccatttaactctctctaaggaccccgttcagagacacgggcacgttgatgggagctgtacaaaggtcagtgatttggaggctcttttcgacaatttgccaggattttggcatttgtaagcatccataggacagctctctagcaagctgaccttgacagcgaatgggataaataaaccttcaatttaccccctccagctctccgcgagctgggccagtccccacggagccttcacctgtccatatcgttcaactgcctgcaacttccaactgacgaacatccacagctccgcggcccagtgacaaacaccatctaacagataagccttctgaaaagtcaaagccaatactgcttccattgaaaatttaatgccagctccatctttgcccatcattcttccgactgttccatgtttcccaagaggcccttgaagctaaagcactgctctataacaggtaatgacgtagcatttaatgatactgtccaaagtgatcccggtctttgggaagtaatgtgcactcatgtaccagataagcaccgccaaacgtactgagccgccatatctttcacggccctgtcaccagatacaatgtgacacatccccggccatcctacctgctactcctccgaccccgccatcagacaaattgtgcgttttcagagcagagctccaaagcgttaagtgaattcaggcaaaggtaggatggtaacatagccttaattaagtattcacagcctctttaatacttcagtgctcttggattcgctactaaaatctgtgaattatacctcattgaaaaatgtccttaatcgactctgacatgttttattggaggcagaaaaaatgtttcagtatgatagataaggttaaaaatgttactactctgatcatttactctagtgccttgcaaaagaactccaaagccaaaaaccatttacatcattcatcggatgcaatggagaaaaaaagccttatctgacagcccattttagctgatgggacaaagtgcacattttcaattttctgacaaagttatgttgtttatgtagataagggtaaaaacaactgtaacatttctacagcatgccatgagggctggaaatgtggcttcaaatgtgaagtatctccaagccacacggagcgccacgcaaccaacaaaaagccactctttgggcatcagacgaaaacagtgcatggagcaccctccatctcaggagcagctgagaggagcagcagagggttttcaaacagccccagagctctgctgagatgtgtcacctgacaaccctataagtaccaaaagtttcatcccagctttagccccattaatttgcagtgggaaacgcagaaaccatcaattgagagaccttctacaggggtgtccaatcttttggcttcctgggccacactggaagaagaaaaattgtcttgggccatacataaaatacactaacactaatgatagctgatgagctaaaaaataaaaattaaaaaaatcacaaaacaatctcataatgttttaagaaactttacagatttatgctgggccgcatgtggccatgtggcctacaggcctcgagctggacaagcttgctctagatgttggttgttcattggaaacactgagtcttgctgttttctctgtactctgaataatatggctaaccctggaggtagagattcacactccaaggcctccacatgcccttctgtggaaggggctcaggcagttgaacctgggtataccctgggcagtgacccacacatcctgttacatcttcctcaagaggccattcacatgccacctcctcgcagaccacacatgctcccctatgcagactcatcactgtctcattaaggtggtagaggccctcggcatagcatggaggctatcaggccaggtcctaacctagacagccaggaacaaatctttggtccaaagctagatggctacatgatcttgggcaggtgacttaatatccctgtgtcactgggtcctgatccataagagggagaggatggcaagggctgaagtgcagatctgccaaggcagcacccatgatgccctcctcccaggggttggcacatgggtggtgttcaggtaatgtcagtttcaactcttgctactgagggcagattcgacctcgcataccggctgctccaaaacatgtcactaacgctccactggtattttctaaaagtcagtctttcttaggccagttatagacaggattgttttccaagtagcctcctgccctttgggattgaaattcattataaacctggcagacactcacctgctcagtccatgctggggaaaagaatcttagcagaagtttcctaattaaagctaccagagtcagataaagccaggaaaatggttacaggttaaacgatgggattaaacagtgaagagtgccagagcggaggaagaactacaaagaaactgcaatgatgcttcttccaatgtgttgtccaggatgtccagtgaatgtcctccacctctgagccatatggccaaagttacgtggctgagtagggctcatggacgtgtttcatctgacaggtacagagtacacgtgtttttttaaatgttcctttcattgttgttacagagccttccttgaccactgtgcccaaccttaacaagccagcatttctctatgtgtgtgtgtgtgtgtgtgtgtcagagtttctctcttgttgcccaggctggagtgcagtcgcatgatctcagctcactgcaacctccacctcccgggttcaagcgattcttctgcctcagcctcccgagtagctgggactacaggtgcccgctaccacacctggctaattttttgtatttttagtagagacggggtttcaccatgttggccaggctggtctcgaactcctgacctcaggtgatctgcccaccttggcctcccaaagtgctgtgattacaggcatgagccactgcgcccagcacaagggagcatttctatagaatttaagtggcatcttctagagttgtgaggcactgcctggtattaacaccatttataaactagtaaccaacatctaaaattaggaaatgcaacaggaaaacacactgtcttatgaaaacaaaaatcccaggatttttgtaggcctacctcctacttctatgagaagtgggaaggacattctaactacctggccggtacacatggatattatgaaagtcatgggaaccatgaggaactcctcagactggatcctgggacagaaaaggggcatgagtgggaaaacgggtgaaatctggagttcagtaataataataatagaacaatgttgtttcttagttttgacaaatgtaccctgggaatagaagtttctaatgttaggggaactcagtgagaggtacattggaacattctgtattctctttgcaacttctctgtaaatctaaaattacttcaaaataaaacatttatttttttaagaaagtgagaagttctaaaccgaaaggaatgtgtgcttttgagacatgcttcacgtcactcaacgcttttggtgcctggagcctggaggcatttgaatttaggacttctctctctccccgtgaaagattatctgcaaacaccccaagtgatattatatccatattttcttccatggggatctctgaccatcatgatcaagccgactcccttgccttgatttggggtctatgtgatgggagggaaaaaggttcaagtcagggaacgtcctgttttctggggctactatttcccacacccaccactgagcagaaggaaggacattgagcactacacctgatcagtggagtgtctttgaccctctgacagctcttgcatcgaccacagctgcttgcagggctgttctcagtggcagtccccatagccaccaggctgcacagccccagctgagcaaggctcttctacctgcacctgcctgggagcagagctgctaggacccctggagaaaggcagggggcaggcagctggtggagggcagagagagatgttgttgatggttttccaattctcatctggaggtcttgttaaaacctcacccccagagtctctcactcagttggttcggggtgaaacccaggaatttgcatttcttacactttccaagtgatgctgagccactgtcctggggtggcacttgcagaaccactgctgtacacaattgaatccttgcctaatgtatggatatcttgttcttattgtttccagggaatgcctcagtacagcaaaagctgtcaaggcatgctgaggtctccacgaagggagtggtttggcctgttccaatgggtagtagtactgccttgccacacaggcagtccagtggttaaggggaccagattaggagccacccagcccctagtttgaatcctgacatcactgctcactagctgtgagacccttcatcactgtgagacccttcatcactgtgagacccttcattgctgtgagttgcgtaccctctctggggcttgttctcctcatgtgcagattgtacataataaatctgtctctgcagggtagtcagcctacatgctgagagcaccttggccggatcttcactcaggaccattcctctggactgcagattcctatgccacttcttaccaaagtaacaagcattgcacacttgaatctgtaaagcttaattcctaccactttcctcctccaaaccttcttcttccacagtctttctcatccctcagtcttccttatctcagttacaggcaattcatccatctggttgctcagctcaaaattactgagatccttccaccagccagtctaaaccctatggtctcaacacgcaatgtcctaaccatctctctacctacagagcctctcaagcttccagctccagttgcactggacaccctcacagcccttctgcagagctgggaatggccaaatcctgcaggcccactcatgtccctgcaagaatcctgatgttgggagagaaagcatgcatgttccctcctttgctgctccccaaacgaaaggccacctgcagccttatatttgcaagaaactcatgctgagcatctgagcctaggaagacacagagtcctgtcctccaacagccagctctcaggccttctcgaacctctcccttccctgccagatgtgaccttgtactctggatgcctgtggtttggctttctcctcctcacaaacatggatgctgtccttctagcagagggattgatgtgtttatgcatgtatcataccttcccctctgaggatgggggcatgccttgcccaaagcacccagccagggctgagcacagggactcaactaggaggatttttgctgactgataagtccccactggacaggtctgagggttctccccaaaccatgcactctggcagtgggctagtctgaccacctcccccgccgtgtgtgtgagacccgctggtgggcactgtacacagcatggacgtggaagacaagcctggaagtgatgactctgctggagtgagcagcaccacaacacagagcagatcgctggagggaaagatcacctggggcggcactccagggtggagtcaggtgaggggctagaatttcagcagctcttgggggaggggagggcatcatcagacacagatggtaatgggggaaagaggaagagaagggggacaggggtgggagagagagatccacataaggaaggcaggagggcaggaaagggcagtggtatgttcatggagtggatttccatcctgtgtgactgcagctcaggacaagctgggcactggggacagtgatggtggcaggagtgggagctacaagtcagaagttccctggcttcctccctaggaggacatggagttttggaggcacacagacagccccggaaggcaaaagtgttcatcaagcaacctctgactcaaggatatccctggaccacacccctgggagtgagtgcaccagggagtcacattaatcccataaaccctgttgttgtcctgtgactggcaccattcatgcatggcagttttatacattaaaaatgtctatgttttggagccaagtgaagtggctcatgcctgtaatctcagtgattcaggaggccaaggcaggaggattgcttgaggccaggagttgaagaccagcctgggcaacatagtgagacccccattgctacataaaaatgatttttaaattagccaagcataatggtgcatgcctgtagtaccagctacttggtgggaggctgaagcaggaggattgcttgagcccaggagtttgaggctgtggtgagctatgattgcaccactgcactccagcttgggcaacagagccagactctgtcctctttaaaaaaaaaaaaaaaaaaagtccatttttgaaaaggcaatcatctcaataatgcctcagtattttgatagtctcctgttttaaaatgattattactgtttaaacttacatgaagcctctgatcctaacccagtagatggtcacctctagccagagcccaaatgctcatgtttgaagctcgggtttgcccttacctgtggatgctggatgccttctgtacctcattgtcctcatctgtaaagtggggataataataataatagtgtccacctcacaggggttcacagaagttcaatgaatcaataagcataaattgctgcccatagacccgggtacatggcaaacacgcatgaatgttaaggaggaacccccagcaggagaaggccgtgggaaacaactccagaaacagtggacagaggtggggggatgtgcatgtaacggagcgcctcaggagtctccaagcaggagcaaccacatggggactgtatctcatgggggctgcatcgctggagggtcaaattaggtcacagagggcccaggggctggctctgaagctccagccatatcacacacttgagctgcaccctggggctaatggcagagctgtcgatgggaagctggtaaggcaggggaccccaggaatcagcccacgacctgccatgttggtcccagtacacctcccagctctccacagctcccccaagcagggcttcaggtttctacccacagacctggctttgatggagcctgcattttgttttgtttcagaaatactatagtaaaatgagtgtatctttctggttattaattttctgatttttttctattttgcttatttatctaaatggaagatgttatatttcccaaccagctgctatatgaagtgtgagaaacaattggaaatctagctcagagtagctgaaactgtatcagttggagttgaaacaaacatcttttccccactcaggaaagaaaatgagacaaagcaaggaagagaggaaaaaaagagagagagaacagaaagagaggaggtgggaagggagggaagaaaggggaagaggaacccagttcgattatgttttgtttattgctgcattactcaggtgattgcttacttaagtccgactgccaggctgagcttccaatcccagttctttcctgtgttcataaggctcagctagcaagcagtgttttgccccccatagcttctgtagatctggctacagttaaatggtgcagatggaagtgtgaatggagggtgagccccgagagccatttggggctaactgaggtggaagaagatggggctcagagctcggtcagggtcgggttagggtggcttgctattagtgctgagaatggaaattcctcagagtattcagagcagttggctttagcctctgcactggccactggcttgtgatcccgactcacatcaaggtacgggccaggtttgatcctcctggacagagaagaaatgaaaaagtacttcccttttgtccttaagcacctgttcccactcaccgggtcaggcaaatggtgctttagaaatatgccttatttaatgaaacttctccaccttcatctctcagatgagaagtctggggctctggtgcccagacaaagaaaaacacaaggccattcaaagaacattcttgatgacactaattcctgctctaaatactgctgtgatggtaaattttatgtgccaatttgactgggccccagggtgcccagatatttggtcaaacattattctgggtgtgtccacaggggtgtttctggatcagattcgcatttaaacaggtagactgagtaaagcagatgaccctccccgacgtgggtggggcctcatccaattcattgaaggccagaattaaaaacaaaaggctgacgtcccccaggtaagagagaatgctccctgcctgccagccttcaaactggaatatcagctctttgtggtttcacaacagcctgctggccttcagactcaacctgagatgttgattctgtaggttttggacttgtcagcctccataatcacatgagtcaattccttataagaaatctatctgtctgcccaaccatctatctatctatctatctatccatccatccatccgtctatccatccatctagctatccatctatctatatccatccatccatccatctatccatccatccatccattcatctattaatctatctatccatccatccatctatccattcatctatctatccatcgatctatttatctatttaatctatcatccacctatcatctatttattatctacttatctatatctagcattcatctcttgctatctaactatacctatcatctatctatatctaccatctatttctctacctattatctatctgtatctatcacttatctatctacccattcatctgataggttcttattctctggagaactctgactaatacaactgctgccctgaaaaatcacagcctgaaccttagtatcagtctgctgcaaacttgccagaaggattgagagaggcttagatccaggcattctcaaaacaccatcctctaaacaaagtctttcaaaccagaggactctcatccatgggaggccaggtggaggcgtggcacctggagccaggagagaggcacaggatgaagccacagggcaaaagaagtgggtcttcctacagttcactttgtgtgacataatgaagctcaaacattaacttttacataaatcagacatagatagcaataaatagaattcaaattttgcatgacttaaaaatcaatcacgagatgatagagaaacttcacaattgcagtaggctgtggactctgccttcaagatttcttttcccctgcagtgacttggactagctgtttgtttctcatttcctatccatggggaaatacctgaccatcaagggaagagccctcggccatgaggggcttgatgggttggctgtctctccgaccaccttttacatcctgagtcaaattcacatgttgggggacaaaaacctggggcatgaacttgacctccaaatttaaaagtcccctcctctgccctgtttgtgacaagtggcctgtccccacccatcccagtgctcaataaccacaactttcctccagagaggacatctcaatgaaacagatccagaaagcccatctggaccttaaggggaggcccccagggtttcctcttctcctgacttagcctttccctgtggaacccccccatgcttccaggtagcacatagagcctccttgcacctcacctgcccccagcctctgaacacaaagcagaaactcaagcttgttcatctaggcaaagggaaaggcagctcccatagttgaaccactctggtctcaaaggctaagtatttcacacctttcctgaggtttttgttaggtaggggccatgtgctctgcaggagccagcactgtgctgcatggacttggctgggacaatgaattcttccgacttcttcaggagctaggcgggatatcaatcaggaggaaagaagcaccagaggctgattcacaggcacaggtctcttcattggctggagggtggcccatggccaccacgacatgcagaggcctctttatttaaccttgcttgtttcactgcacacacacataagcacagacacatgcacacacacacacaagcatacacatgcaagcacagctctacatcactcctccaaaacttttcagggttgcccaagcccggttcactggagaattcctttctctggaactctccacttgccatatggagctatgcaaattaaagtgaccacatagctgcagtctctgttcagacctgcattcccacccccacttcctcttccctccatcaagtcttctttccttctgtggctactgctttctctcctactgtcatgacagggatggccatacagggacagagaaagaggttaagactgaatccaggagacctgggctctccttccagtgccagcactgattaggaatcacaaaccctccttgcacttgtctcctcactgcctccgtggacttgacattggttttcctgccacctatttcgctaggagatcagaagaattaatgggcactttgtcatccatgagtctaaagattattggagttaactgcattctctgtggcaagcaacacgctggctccttgccgtgttcctgcagctttctggactcagtgctgtccattggtgacactgaggcactacccctctcctccattctcccctctaacacagggactagaaacctggaaactacattttctggaacctcatggaatggaccaatgagggagacagttgcccagtatttaatggacaggagccatatcgtttttcctggggcagcaatggtagatccacaggctctgcaggatgaacttgatttacagcctgcaaagttcccagctatgtgctacaggcaactgtagtcattgctggtggcttgcagcaaagtctggagtctctgaaatccagtggcatatctgagaacttcagccagttccttgaccttcactcctccaaactttcaaatggttttggaagcattacattgtctacgtgaaatccctttctacttgagatattcacaatgagttctgggcatgtcctgtgcttgtgtatgtacatttgtgttttcctctctgatacacttagtcctgaaaaaaataccaagcatcacttgtgtatttaactcaacgtctgaaatgttggcttacatggaaatatccgataacattggcataaaacaaggtatggctgtcaattgaggactcttagctctgtgagggaatgacaaggttagtcggagaaggcctcagtattttcaatcacaagctttccgaaacatgtttcagtgctgtcccatttcacacattatattacattgtccttggaaaataaatctcttttatttttgtataaattaaattcctctgtaatcagttccaagtaactagctaaaccattggttgtcctataactttgtagtgttaaatatcactgacaaatacatttaaccctcagagagtctgaaagcttgtgttaaagggatcatttaatctgaccgtagccacaataaggggtttgagttggtttcctcgtggcctcccagatggtgctgggactgcatcaaggctggtacccagtgccctccagaatattctgttccacctgctctctggccttgaggctaaatgagccatttttctgttttcaacagacttgattttgtccccttcttttaactgatggccacagtgcttttctttaaaaacagagggggattctctctttgagatcatcaggaactagccaagctgtttgaatgcagagaaatgaggaccaaagggaaaacagcttaatgccacagagaggtatctgggcactgaagtgtgccaagcacactgtgtgaagatgctgggcacccagcagtgagcaagagcttggtttgcactggagacactggggactccaaagtggaggaggagagacaggggcaagaattgaaaagcttcctatcaggtactatgttcagtatttgggtgatgggttcaatagaaactcaaacttcagcatcatgtaatatattgtggaacaaacctgcacatggacccctgaatctaaaatacaaaataagtaaatcaataaaagtttaaaaaatcctttcacttctgccatgcaccacatcacattcacaggtctcacccacaccaaggaagggggtcaggctgggcgtgtacaccagggagcaggaatgttgggaaccacataacgcattgtcctgatggaacttccatttcaaccagggagatacactctgcatgtaactggaagggcggcaggcaggcgcagaagagcgggcactgtgggagggcatctggctccatccccatagcagtagggcctggcccagtgcagggcccccatcgcctgcctccctaaagtgcagctcagcctcttctctgctcacagaggcatctcacacatttgtgacaactggcactggcttattcatcatctcagatagcaactctctgttttctcagacacccactttaatactctgacatttctgttcagcccataacattctgtcaattgtttacgtctcgctcttgcaccaatcgccttttctgccgtgctgtcggccctcccaggccctggtacgtgctgcttagcaaaagggtgggtgtcaccctctcgccgtccacaccactggatttccaaagaagtgtgctgcatcccaagccgccaatcatctcccaaggcactcacaggatgctcctgtctcacggtagatgctgcctacagaaaggcagtttgttgggctctgttcacccacaggagcctaagcagggactcccattctgcccctctccagttcataaccaaaaggcctgttgccagaacctgcaagagggcagaattgcactcctttccatctaccccatgtctggcccatcaataggacctgctgtccatcatctggccacccatcctggctcccctccctcagtctggaccccaccctaccccattcacccctgcaggcactcagcctttatccagaccacacacggcatagtcgtcttaaaacatagtgtgcaccactgccctggggacaccctgtaaggggcttcccactgccctaaggatggaatccaaacttccctccatggtctacaaggccagcgttatctacccactgctcccctcccctccctgaccatctcaacccctcacacatgccaggtcaggccactctcctaagtgaaggaatgcaggttgtatttcaggtcctctgcctcctttccatgtcagggttggggcatgtgccattcccctcacatggactgctccctcccacccctatgggaaaaggagaaattctgtaattagtggtgttgggacaaatgaacaagcatttgggggaaaaaaacaataaaaacaatgtttggttcctacatggctcctacctgtcctgcaggctttgacttaaacattagtttctggaatagaaatatcccatattgattctttgcctcacatacttgttagaattttcaagcattggatgaatttgtctgtttaccttttcttcctgtctgcatgacaacctgcaagtctcagcaaggcaaaaactaggccttgttgctcaccattgaatccctaagcaacgcattgcctaacgtagggcacaagctcaataaacatctgtgggatgcaggaattaatgaatcaataaacactaactctgcagtatggacaatgggagcccactctatggtttaaaatgtgaaagggcaggggaaaggatcttgtcataccctatattagaaggcattctgaggcataataattaaaacaatgtggcatttctaagaaagagtgaatacaaggccaggcgcagtagctcatgcctgtaatcccagcaatttgggaggccgcggagagcagaccacctgaggtcaagagttcgagaccagcctgaccaacatggtgaaatcctgtctctacaaaaataaaaaaatttgtcatattagggtgtggtggcacacacctgtagtcccagctactcaggaggccaaggcatgagaattgcttgaacctgggaagcagaagttgcagtgagcctagactgcaccactgcactccagcctcagcaacagagtgagattccatctcaaataaataaataaatataaaagtaaaaaatagaaagtgtgaataaaaaattaatcaatggaacagaataaaaagtgaagtaagaaaacatatcactcaaacattaaaaatgttgctttccaaatcaacaggaaaataaattattcaaaagattggtatggacaactagctaacaacaagaagaaaaagtgagctacagtcttgcctcgttacaatgaaataaataactgtgaaatgactaaacatttgaatggaaaaattaaaccattgcactataatataaaatttcttttaattacagtgtaatcttggaatgaagaaatcctaagtataaaactaagggcagagccatagagaaaactttgatctcttcaacgaggtaaaaatgaaaaactcaaacttaaaaactgttgttgtggtagcaggattttcagccatggtggagagaagagatcagcaacccttctccccataaaacaagtaaaaattggacaaaactatcaaaaacaaacactaagagctctggaaattgactgtctctgtccattgggctgctataacaaagtaacacagactaagtggcttacaaacaacctaaatttatatcagttctggaggctgggaatctgggattggggtgccagcaaggtcgagttctggtaagggctcttttccagggtgtagactgccaacttctctttgtgacctcacatggcagaaagagagtcagagagctttctgggctctatatataagggctctaatcccattcatgagggctccccccctcccaaagtctccacctccaaataccatcacaatgggattagggtttgaacatataaattttggggagacacaaactttttccataacattgacccaaagcaaacaataaactggaggcatttattcatgaaaactgcaagaattttgagtaagaacagtaggatttggtgatcttcttgcctagggctgctcccttctcttccccagctaaattggcatggtattttttttaggacaagtctggctggaaaaacagcatcttcactgccaaagggagctgatctgttttggagtgaagagcaaacctgtagttggttgtgttgtctttaaaagttgcaaactcagaagaaaattaaggaggaaaacccacaaccctgctaatgtaaagttgcagtcccagttggggcaaatggggtgaatggataaccagaaatttaatgcgaatatcctggaagagctaactaagctatccacacatcttgggttttatctctacctagagagcctctagcatgtgcagggaatactcaagagggcccagaagaaagtaaaactaaatcttaaggcagatttgaaaactgcctgaacatggggtacaagctacaacccatacacaaatcaatcagcagagtgtggaagcactgagcatcttccaatgactgactgactactaatctatgcagacacaggggcaactcttaggaagtcaggctaaaaataaaaataaaaataagaatttaagaaactaaacagatgtatcaaccacacatgcttagaagacagatttcatgtattaagtccaggcaagttactttttttaatgcttaggggaaattttacaatccagagtttgcataaaatattattttaaatgtccagttttcaacaaaaaattgtaagaagtggtaaagtataaattatactcagggagaaaaaaagagaacctatataaactgatgttgagtgggcccagatgttggatttggatttagtagacagagagttcaaagcagctattagaaatacattcatgtttccatggtgtaatggtgagcactctggactctgaatccagaaatacattcaaagaattaagaacactatgtttaaataattaaagaaaaatcactgcttcacattctatcaaaaactgaactcaaaatggatgagcaacctaaatgtaagagataaaaccctaaaactcttagaagaaaacctagaagttaatcataatcttggatttggcaatggattcttagataggacaccaaaaacatgagcaatgaaagcaaaatagataaattagactttatgaaaattaaaaactttgtatcaaggaggttatcgataaagacaaaaagatgacctacagaatgggagaaaatatttgcaaagcacacatctactaagaatcaggcattcagaatacataaagaattcttataactcaacaagaaaaacataaatgcccaattaaaaattgagcaaagtacttgaataggcctttctccaaaaacatatgcaaatggctaagaagtacataaaaaacactcaacagtattagtcactagggaaatggaaatcaaaaccacaaatgaggtaaaactttatatttcatacagaaaataacatggtgaggatgtagagaaatcaaaactattccacattattggtgcaatgtaatatgatgcagacactgtggaaaacagttggtcacttcctcaaaagctaaacatgaagttatcatatgacttagcaattccacttgtacatatattccccaaagacttaaaaataggtactcaaacaaatacatttatatgcatagttatagtagcactattcacaatagcaaataggtggaaacagcgaaatgtttatcaacaaatgaatgaataaagatatcatggtatagacatacaatgaaatattatccagccatgcaaataaatgaagcattgatatacgctaccatgtagataaacctcaaaagcattatgctcagtgaaagaagccagacataaaacgtacatatcataggacatcatttatatgaaatatccagaaaaggtaaatccagacgtacagaacacaaattggtggttaccaggggccgaatgaagggagaaatagggtgtaactgcttaatgggtataaggtttctttatggagtaatgaacatgttttagaaaaatgttgttgatgtcctaaatgccactgcattgtacacttttaaatagttaattttatgcacactttaaaatagtgaatttcacctcaattttaaaaatctaaaaaataatgaaaggaaaatataataacaatgactcataccaagaaccaaaatagagaaatataaactataaaaataaactaaataaaaattatagatgaaaaatacaatgacgaaatgaaaattcactagaagagttcaacatcagatttaagacggcagaataaagaatcagtaaactgaaaaatcataaataaaacttatctaacctgaaaaatggagaaaagattaaaaaaaaacagagacatcaagtgagacaacatcaagaatgacaacacatgtaaagtgggagttctagaacttgagaagagagagaaaggtatataaattgaatattcaaaggaatagtagccaaaaacttcccaaactggatgaaaacaatttacagaaccaagaagctcaaaccaaatgtaggataaatacagtataatcagcctgctgagagctaacaaaaacaatcagaaaatcttgcaagtagcaagagtaaaacaacttattgtgtagaggggagtaacaacaataattaacagcagactctgcatcagaaacaatggagtccataaggcagtaaaataacattttcaatgtgctggggctgtggtgggtataaaactgttaaccaagaattctgtatcaaaaaaaattattcaaaaatgaagggaaagatgctcctaggtaaacattgagaaagtttgttagtagccaaccaatcttgcaagaaatgctgtaggacatttttcaggttgaaaggaaatgtcaccagatagtaacttgaatcaacaggaagaaatgaaaagtttaaaaatggtaaatatatcattaactataaaagaatgattaaatatatattctgcttttttctactcttaatttttttcagaaatataagatttcaaaaaggaattagaacactgtattttttagcttctaacacatatagctaaaatatatacgacaataacgccacaaaacagagagaagaaatggaactatactatagcaaagtggcctattttgctagaattaggtcagtactaacctgaagaaaattgtgatacctcaacagatatattttaaacctacaaagcaaaaagtatttgaaaaaagtttaaaaatacatcattagaaaaacagaggaattaaaatggtacatgaaaaatttttgtttaacacagaaaagggcaaaaaaaaggagggacaggaattaaaaaaaagtgagacatattgaaaacaaatagcaaaatggcagatgtaactatatcaataattatattaagtactgaagaactaacctctctaaacaaaaggcaaagattatctgaaggataaaaaagcaaaatccaattatattttatcaataagagacacgttgtagactcaaagacaaataaatcaaagtgaaaagacaaaaatagatataacatacaggcattaacaataagataactagagtggctacattaatatcaagcaaagttggttttgagaccagaaatttttctagagataaaaagaaatatttcatattaataaagccttaatacatcaagatggaatgagtgttgtcaatgtgcattatgaatctaataatatgtataataatatgtgtattatgaatctaataatagacttcaaaattcaataagcaaaatctggcagaattaaaagagaaatagataagtcaattattatagttgaagatttcaataagccactgtaaacaatagataaaattagtaaaaatataaatacataaattttacacatataaagatattagtaagtatataaatatataaaccactatcaaccctactgacctaactgacatgtatagaacactccaacagaagaatatagtcctctcaagtgtataaagagcattctccagaatgaataatgtctaggccatgaaaaagtcttgatgaatttaaaatgatctgaatcctttaaattatattctctgcctccaatgaaattaaattagaaattaaaaacataaagaattttgaaaatttggaaatttaaaaacatacttctaaacaaccagtggctgaaaaaaggaaattacaaaagtaattagaaaatattttgaacagaatgagaatgacaacaaaacataagaattattagtgcatcagggaagggttgcgggattgcagatgattacatagggcacaaggaaacctttggagaagacagatgtgtatattattttcagtgtaaattcttgcacatgtacgtatgtcaaaatgtattaaatattagtttgtacattttaaatatgtgcagcttattatatgacaattatgtttcaataaagttattaaaaagtgcaccttgtggtaaatttataacattaaaagctcacattagaaaagaacaaaaatctcaagactctaagcttccaccttaaaaaaaaaaaactagaaaacacaagcaaattaaacacaaatcaagtagaagaaaaaagagatattagaacagaaatcaatgaaaatgaaaataggaaaataatagagaaaataaaattaaaatttagtttttcgaaaagattagcaaaattgataaacttttagctagatgggtgagcctaaaaagaaagaatacaaaaattaccaaaattaggaatgaagaaggtgttatcactaccaaacctacaaaaattaaaaagatcataaagagagactatgattaactttaggccaacaaagttagacaactcagataaaatgaaagtcacaaatcaccaaaactgacacagaaagaaatagaaacatgaataaaactacaagtaaagaaatatatttaatagttaaaaaatcttctcacaaaacagcgcaggcccagatggctacactaatgaattctatcaatattaaggaaataatattaagcctacacaaactctttcagaaaacagaggagagggaaacatttcccaagtcgttctataaggctggtattatcctgatgtcaaagccagaaaaaggcatcacaacaaaggaaaacaaaagatcaatatttctcatgaagatagaaaaaaaaaatccttaacaaaatattaaaaaattgaacacggctacagttttttaaaaaaagattattatataacattacaagtgatatttatctcaggaacacagtttagtttcacatctaaaaatcaattaatgtaatacacaatattaataaaggaccaaaagctcacatgattttctcaattttcaaaatccacacccatttaaaataataactttctgcaaaccaggactaaaagggaacttccccaacctgataaagttggggaaacctatgaaaaacctacagctatcaacatgactgattttaaagactgtattatttccccttaagatcaggaatagggcaaggatacctggttgtaccttttccattcaccattgcagcggaggaccaagtcaatgcaataaagcaagaaaaaaaatcaaagacatacatagttgacccttgaacaacacaagcttgaactgcataagtctacttacacatgaattttcttccacatctgccacccctgagaggaacaacctctcctcttccttctcctcttctgcctactcagcgtgaagacaacaaggataaaaaccttcatgatgaatctacttccatttaatgaatagtaaatatattttctctttcttatgattttctcaataacattttattttctctagcttattttcttataagaatgcagtaaattatatatatatataaaatatgtgttaatcaactgtttatgttattggtaaggtttccagtcaacagtagggtactagtgttaagttttggggcagtcaaaagttctatgcatattttcaactatgcagagaagtcagtgcccctgattcccacattgttcaagggtcagatatatattgaaaaagaagtaaatttctattcatttctacagatcataaaaagctactggaactactgagagaattcaccaaagtcacagataacaagatcaatatgcaaaaaccaattgtacgtctatagactagcaatagacaatccaaaaaacaaaattaaggaaaaaaaattcgcattagtatcaaaacaaatacttaggaataaacaaaagatttatatatggaaactacaaaattacaactaaaaacttgtacactgaaaactataaatcattacatggaattaattacacagatgaaactcaacacattatgctaagttaaaaaactagacacaaaagaccacagattgtatgactccatttatatggactttctagaaaatgtcaacctataccgatagatagcagatcaatggttacctgggactgagtgctgagaatggaaaccaactacaagtcatgaagaaacctttgggagtgatggaaatattctaaacctggattgtggccactgttgcatgactctatacatttatacataaaactaaaactcattgaattgtacacttataatcattggatgctttggtttgtaaattatgtaaattatacctccataaaatggctaaaaaattattgtagcacttccacttttgataagggtatgatagattatttgaactgtcatttccccatgataactagaaaaactagataagatattaaaaataaaaaaaatactctaaggaaatacagaactaacaaaatacagaagaattaacactccatgatcaatgagaaatggaggcccaggaggcctagaatttggggttacctttttcacctggggatatataccaattccggttaggaagactgagaagtgcttttaatagactcaccaaaaaaaagtattgaagattgctgcccaagtttcaacaaagtatggtagagaaactggatctcaaagataaactattgtaaggcttgcttttgaaattaagaattaagtcaaaaaaataaataaaagaggatttggaagtgaagtacaagttgtggatatttaaaaaaaagaaagtacaaattaatacaataagtgggtttagcatggttgctggatataagagcaatatatttaaaatatgtatttttacataccatctacaaatataattaaaaccattacaacaaacatcaaataaaattatatatcaaaagcctagtaataagccaaacaaaaatgtggaagatctccacatccaagattaaaatatatcattgagaaaaatataaaagaatataaacagagcgatattttatgttcatgaactggaagcttgattttgtaaaatattgtattttccccaacatgatctattcaatacaatcacaatagaaattccaacagtattttttttagaagttgacaagcttattgtatcaacgttctattgccacaaaacagattatcaaaatatcattggctacagaaaacacacattccttatctcacattttctgtacgtcaagagtctaagtgtggcttagctgggtctttgctcagagtctcacaaggtggcactcaaggtgttggtcaggctccgttctcatctggagatcagcggtcctcttccaagcccaggtggttgttggtagactttaatccccttgcagttgtaggattaagacctcagttcctagagtctacacccaattccctgtcacgtggccttctccatagtcagtttacatcatagcagcttgcttcttcaaagccagtagaactgaatgataacaagactgagtttatatatatgtagtacatatgtgtgtgtgtatatatatatgtacatatatatatatatatatgcatttgctttacaggagaaaagtcacacttgagagttagaaggaaatgacaatgggacaactagatatctatcaggaaataaaattgatcctaccttacacaatactcaaaaatcaatacccagggaattttagacctgaatacaaaaggcaaattaataaagccactgaaaagtaatatacgagagtatattcatgaccttagggtagattttactacattaagactaagaatttctgttcatcaaaacattccaacagaagagtgaaaaagtgacagatcatgggaacgcacctgtgacacatgaaactaacaaaggcttttcaccaaaaccacaaagctattggaagaaagacaggtgagccagaatagacagatggcaagaagacatgaccaggaacttaggagccaggatctccaaatggcaaataaacagcccagaagtgttccacctcattagtcacctaggaaatgctggttaaagccacaatgagataccacgacccacacacctgaatggttggaatttaaaaataaaaataaaataaaataataagctaacagcatgacgttttggcaaggatgtagagcaacaggaacagtcagacactccacgtggggtgtaaattgtacaagtacttcggaaaaatgtttgtgagtgtatgccaaagctgaacttacacatactttaacacaattttagttatatatgcaaaagaaatacacatgtatgtgaaccaagagacacatacaagaatattcatggctgcattatcaattgcccccaaaactggaaattacttaaatgtccatcaacagaataatggaaaaatacattgtgctatagtcataagatggaagactgcaggaatgaactgcaagaatgataaggaacgaactacagctacaggcaacaaacacataagatcacagtgcatattcccatttatataaagttcagaaaattagtaaaactatgctatagtatttagggatgcatgctcacatggtaaactataaagcaaagcaaggaattgcataccataaaagttagcatgctcttttggtttggcatggattttgctggggacgaaagaatagtgattgtgaagtacaaggagatttcagattgctggcttggatggtagttacgtgggtgttcagaacgtgattattattgagctatatgcttttgtgcacttttctctatgtggtatatttcatgataaaatgttttaataccattaactaaaaatttattgcaacatatatgataaaaattttgtatctttaatatgtagtcagcttttccaaatcaaatgggcaaacaagtgtgagatagaaaaacagaaaatcaaaaactacaaatataagtgtccaataaacacttttaagtagccaatctcagaaatcaaagaaaggcagtttaattatacaatagaaacatacaacaataagggaatttctatgcaatagacaatgattagccatgaaaagtaatgttataaataatattgatgatatgaaatcatagtcatgatataataagtgaataatatgggttatcaaactattgaatatgtgggagacagaaccttgcttactatttttaaaaagtccatgttgtaaaactgaatataattgtgatctatttttttaaataaacctatatgtaggtatgtatttatctatatgtaaaggaaacaataggatgattttgttgtcgttgctgttactgttttgagacggagtcttgctgtgtcacccaggctgcagtgcaatggtatgatctctgctcactgcaacctctgcctcccaggctcaagcaattctcatgcctcagcctcccaagtagctgggattacaagtgcctgacaccatgcccagctaatttttgcatttttagtaaagacggggtttcaccatgttggccaggctggtctcgaactcctgacctcaaatgatccgcctgcctcagcctcccaaagtgctgggattacaggcatgagccaccgcgcctggccaggatgatgtatttcaaaatgttcagtgaccatctctgagtgctgaggttacagattattttcattttataattttctttacgcatgttctaaatttttctcagtgagcatgtattagttatgaatatggaaaaaagattgttcttttttcatgataagccaagaatcatagaatgtcatcagcacagggaagctgtggggagttgaaggtggagagagagtggatattttctcctgtcccccctcatctaccacccatttgccctaaatgtcagtaaggaagattttttttaaacagaaaatagatcaagacctaaactgtctggcagcagagagacgattctttgtccaaatcaatgctcaggcaaatggtaaacaggaaaatctctgacagagccatcattaaagccaatctggaggaaggtgaagatttccaaatacaaaatatggcagctaagagtcaataacaaagatggtgtggaggcacctcatttcagagaaataaaatctccaggtatttctttgtcttgttgcttttttgccattgaccagatttttttttattttaactctctgtaactatgaacaccaggatgtgaatgaggactgcgcttgaagccacctaaaaggtagaagaacacatctaaagcccccagcaaatgagcacacctcgcaggtgtggataatggcagctttgcacacccacctgaccctgtcttgcggggttaataaaggccatcacttaattccttcacaaagccacagtgctccgtagaggggagccttggtaattattacacccataaggtgagtcaagattacagtttatgtgcagctaataaccacctatcagcaattttctcactctctctttctcagtctctttcctgatgagctactcacctgtgtcctgggagtcactgaaaacagaagccaggagtaggagagaagagcaggagggatgggggggcctgtgagtctctcccagtatcagattcatcccagagaaggctgagccccggcaagatgatctgaaaaactacagggctccctggtgccctctgcaatagtgcataacttaaaaccataatagtaggccaggcgtggtggctcacgcctgtaatcccaacactttgggaggccaaggtgggcggatcacttgaggtcaggagttccagaccagcctggccaacatggtgaaacccatctctactaaaaacaaaaaaattagccaggcgtggtggtgcatgcctttgattccaactactcaggaggctgaggcaggagaatcggttgaacccaggaggcggaggttgcagtgagtcaagattgtaccactgctctccagcctgggcaatagagtgagaccctgtctcaaaaaaaaaaaaaaaaaaaaaaaaaaaaccctaaaatatgaatagtaaacctaaatgaagttcaagaaagtccaaaatgtcttgatttatgcccacgatggccactcagatttgttttttttttcctacggtgccctgctttgcagtgtcttaggcccactgcccattactgaccctgggatggtttgatctcccactacctctttgggataacctttaggttgtgcttttgatcaaaatgcaatgatcatgcccaaaactcatcgtaaatttcaggccaattcccaaaacatcctgggtaggggagcccaggcacccacagccatgaccttgtatccccagagtgttcccatttcaagcacactcaagcaggtgaattctcctgatggaagaattcaaaggacagaaatcaatttttttttggctgttactgttttctctttgttctacacttagaccccatactttttgttaaaaatggaaaagagttttggaccactgggctttctccagagtaaatattagactagatggttatgaagctcatttggtcagaatatatgactcttaaagaaaaaggggatcaggactcagggacagctgagccatctgcagagggagaaggttcaggacaatcacccacccagccattaatgagacatctgaccaagatcaccacatcagcagccagctctttcttacaaaagcaaaggcctgtcaatctgagacatagagaaggcccacctgcagcgtatttcatcgagtgtagacacagccctacgtcagatagttatccttttaatttgactgcagtgaagtgctcttgtggccctgacagtattctcttgtgcaccaaaggaagtgaataataattaaagagtcctttggacaatatccttctatctgaggaatcatatactcaaataatttaatttgtaaaacctcttcaccaccttactgcccggctttcattttcttttgcatatattttcaccactcaactaatgatggatagagggaattaagacatggttgattgcatctcataaaggcacttggacacatttaagatcactagcctctttttccttcccagcaccttctaatgtaatgtgttctctgaacacatgtgtaagacacacactgatattaaaagctgtattctataccacctaataaagaggatgccacatcaaaaggcagagttaacatcaaacacgcacaagaatcatttaagagattagaataaaggagctggtggaaggttgatgccactaaactaccttcactcactacctctatccacaagggcaaagttaaacagccacagaaagatggcggggccacagtgcccacagcccatccaacagcacattacactttgtcaccatgtgaccctagctatttccaaaagtatgaacaaatatgtgcaatgatgaaaagtactcagtatattttgtgtgtcctctagaaacaaaggaagaatgctcctgttggggacatgtcatctatttttttcctaagtcaagaattcaacctctgacttgagccagttcaacagaacctagagtagctatttattcacgtaaaaactagcaattctgaggcagataaaaactggtgaccacgtgcttgggtcctactgcagacttctggggactaaaccccggttctgccatgcccttgctctgtgaccctgggcaagttactgagcctctccacatcctactttcctcactgtgacatggggtctcaataatggcccctgtggccaggcacagtggctcatgcctgtaatcccaacattttgggaggccaagttcaggagttcaagaccagcctggccaacatgacaaaaccccatctctactaaaaatacaaaaattagccaggcgtggtggtgcacgcctgtaattcctactcaggaggaatgtaatgcctactcaggaggctgaggcaggagaatcgcttgaacctgggaggtgggggttgcagtgagccaagatcgcaccactgcactccagcctgggcaacagagcaaacttctgtctcaaaaaaaataaaatgaaaaataataatggtccctgcttcctaagatttcttttgtgaggactgaaggagctagttcaggcaaatcagcgtatttgcactctttaaaagtaaatgataaacagatattaactatcatcattagggcaaagaacgaattctatgtgaacttaaagtatcattttccaaactctgttccatagaacaatcaagatgttaatattaataaatgctccagagaaggaagaaaaattaacctggccttggtcgaatgtggcggtgcacacccgtagttccagcacttcgggaggccaaggcaggaggatcacttgagcccgggagttctaggctgaagtggacagtgattacaccatcacatcccagcccaggtgacagagtgagaccctgtctcaaaaaaacagaaagtttactgagtagataagtgaccagttaactgacccttaactagtcagttaaggagggatgtcatgggtccttggttgacctggtctttagttctttgtaactttaacacgttgaagagtttatgaatatctcatggctgaactccacttggaaatgatgagctaaacacaactgcaaaatttctttttataagtttttttctttctttttttttttttttttagagacagggtctcattctgtcacccagtctggagtatagtggtaaaataggttcactgcaacctcaaactcctgggctcaagcaatcctgctgccgcagcctcccaagtagctgagaatgcaggtgctcaccactgtgcctggctaattttcttatttcatttttttttagagacagagtcttgctatgttgcccaggctggtctcaaactcctggcctcaagcaaacctcctacctcagcctcccaaagcactgggattgtaggcatgagccaccaagtccagctatttctttttaaattatattggaaagcaaaaatagatgtaggaaagcatgcttcctgtctgagtgatcctggtacattctctatgagctccccaaatgaaaagtccagcacattcaagaagcttctaaggcctagacctctgtccagagatgtagcacatggccaaaacagaagcaggtcaggaagatgttcaggatgacactgatggcacctccaaattctgaaggaacagtaggaatgtgcagggttctgtttagatgaagtaacagactgaaaaaaaaaaagcttgagtacaaggaaaatatcttttaagactgctaaagaggtcaagagagaaatgaaatggtgcaaacttgacatttgttttgatctctcaaggaaagcatgattttgaaggaaatggcagccaatcataatagaaaaaaaaaaactgtggattttaactaagctctacctcctaaaccaagtggtctctggcctgttaggaactaggcggcacagcagaaagtgagcagcgagcaggcctgtgaagcttcgtctgcatttatagcctctccccatcacttgcatgactgcctgagctctgcctcctgtcagatcagcagtggaattggattctcacagaagccaaaattctattgtaaactgcacatgtgagggatctaggttgtggcttcttatgagaatctaaggcctgatgatctgtcactgtctcccatcaccccaagatgaaacaggaaaacaagctcaggactcccattgattctacattatggtgagttgtataattgcttaattacatattacaatataataatagaaataaatgaagtgcagagtaaatataatgcacttgaatcatcctgaaaccatccccgctggtccgtcgaaaaattgtctttcacaaaaaccgatcccggtgcaaaaatagttggggaccgctgtcctaaatggcatcatcgtgatcactcctgagactcgggagacctcccacaaaatcctaaatggaaatccactttggctcaatgattgaaattcattccccaaacctcagggcttcaacatcagccagattttcatgagaaaatcctagaacactgtccagattattcgacaggtgaaaggaaagcactacaactcgcaaattcattgcttcacttctctgggaagcggtttcttaccaaaaatgaccaaacctgacttgcccacttcatgaggctcggaatggtttctggccatgctgcaccctggttaacactttcagagaatgaaatcataccagtcaaagtcatccagtggaaatcaggaatattcctaaaggtagaacacagaagaagagtcagaacaaaaattcttatggcaataataacttcattttaataagtatatggataacatgactattttacagggggtgggagccagttctcattggctggttttaaaacatcagcctcttcacttccaaaaactgcactgatccctaaatgcgatacaccatgccatctccttaatttatgtaaaacagctttatttcttttttctttttaaaatattttttagaggcagggtctcattctgccacctaccctggagtatagcggtgcaataggctcactgtagcctcaaactcctgggccgtagggatccttctgccactgcctcccaagtagctgggaataccactgtgctggctattttttttattttttatttttttgtagagaaagagtcttgttatgttgcccagactggtgtcaaactcctggcctcaagtgatcctcccatctcagcctctcaaagtactgagattgcaggcatgagccactgagtccagctatttctttttaaattatattggaaaatgggccaggtgcggtggctcacgcctgtaatcccagcactttgggaggccaagacaggcagaccacctgaggtcaggagttcaagatcagtctagccaacatggcaaaatcccatctctactaaaaatagaaaaattagccagatgtggtggcttatgcctgtgatcccagctactcgggaggcagaagcaggagaatcacttgaacctgggaggcagagtttgcagtaagctgagatcaggccactgcactccagcctggcgacagagcaagaccgtgtctcaaaaaataaaaataaataaaataaattatattggaaagcaaaaatagatgtaggagagcatgctccctgtctgagtgatcctggtgcattttctatgagcgtcccaaacccaagtaagtcagagtcaaagacatacctggaatgcacttcaaagtgaagccctttatgctccatgaactaagacaattgttcaacaccaaagatttcaatgatggaaagggcaaatcctcatgagcggaaacggtgacaccccaacttctcctgctccccgagacaaagccaatatgattctaaggaggccttttctttacaaagaaatgtgccttccaaaaggaggaaccatgtcaccaattaagacatttcccaagcatttgctaacctacttacaggcatcattgctcccttgggcctggggacccctccaccttcctgaacggagtagctgaataggtaaatgggttatatcaggccaggaaatcaatgtgtatactgtgttctcagccacagatgagcatgtcgaagccattctattatagctctaggagccgtattgatccagctgtaactactcggaggtggcccgcaatccaatgagaacacatccatctgtccatccagccgcctctctcccccagtagtgcttagagagtaagtgtttgcagattggattaatttaatgtttgcttaatcaaaactgactaccctggaacttaaatgctattaattactaagagaatccagaactaattcactagcactgtgaggccggggaggaacagccgctctgcagagaaagggagtttctgtttgtctctctttccagatgttcattttgtggccttccccactcccattaccactcacccacctgctttccctcacagccttctaaaaagaaaaaaagtacttgctactttggtgtttgctctttggagcatgcatgccgcatgcatgggagtctgctggttggatacacagagcctccacctcagatgtcccggcagcatgcattgcgtcacttgcttttccagtgcgctctggtgaaatagcaccctgtctttcatctacttcttggtgcaaatggttctttcccagagccccgagagctccccaaagataggagctccccaaagacttgctaatctgtgatgccccagcaccgagcactgtgcctgttgcatactggcattagcaagtgttttctgaactgaactgggggaggagacgatggcccctgccaagggctctatgtttacaaagccctctgcggcattgacacctctccagggagtgtctcagaggcttcagttcaactgcacctgcatccaatcctccatcttccttgtccttgaaaagacagcagactgttcttagaaccaggacccaatgcctatcttgcttatgaattaaatgccatcacaagaggagtgtgaaagtgcatatctgcctccaaatctatcccatggctttgcaaaagcataaccaaggaccacaaaatgccatgcagttcagccagagggctagcaggagccagaagaggcactgctacaccctgaaacgtgtctttagccccagcaataccacaggcttttggtaaaacaactgcatctgggcatctgcagtttggccatgagcacatatcacatctcatgaacatctcactatttgtggtgagtggtgagtggttccactatccactatgtgtattgtacagaaaaactccactgctctccaaagggaattcctctgctgagcacctggcccctggggtggtcactccttaaagcagaggttcttctgcaagggcatggttctcagcccccagctaccactcgggaacttgcagctattattacaggcattgcagacttaaatccctacaaggacacagcaggcagagtaaatgaccgaagctagtgaggcatacgtccctatgcagtggagaggagcagagcaaactggggagcctgtccctctccaggaggggctgctgtgactcagcgctcactgctgttcccctgcagaacacaggctcagtatgaataaatcttcttacttctgcatgacctcaccctacagtaaaatgctggcaacgaattcaatttttaaaacattcacatgtcattcaaataaggtctatagttcagttaataatattgtaccaatgccagtttcctggttttgataatgtgctatggtcatgtaagatgttaccattgggggaaggtggggaaagaatacaggagaattcttggtgctatacttgcaactttgtgtgcatcttaaattattttaaaatggaaaattaaacacacacacacacagtgcaggccaagctacatagctcaacaagccataggttttctaagtttgttgacatcccttggtcacatcaaagtgggctagtgcctcacgggcaaaatgggagaaagacccaaaaccctgacctgacagcttccacacatggccaacctcagctgttgacctttttatggaaccagtgccctggaggtgacactgcagacttagctcactgaagtcctgcctttgccagatttctgaaatcaaatcaccactgcaccacacaacacccactaattcatatgcattttgcacaaataattcttatttgatgaatagagcaccagacttacaattcagccgtggtgtggtaaattacactggccagattaactgtacaaagaacacctctcaaaacaatgatttcacttcgagctaagggggaacaagtgccctttctttcatttctaaattacattttcaatcataaatattgaaaattacatttctgatcaccgctgtcaccttgtgagtagtggcacacgagccccacagacacacgggtttttacagaaggaaagcgagagccattagaacaccctaaccactttgagttttaaagggcctgttctcccagcccacaagattataaaacgatggcaccctttggagcttgcagaggcagggagaagcagtctcactggcacattggttgttaaacatatggaattattactctgggtgtattttaccacttattatacatgggctgttccaagtatatacaggtaggtatggtgcagccattgccccagagaggcagacaggaaaacagatcatacttctgcctggtagacctctgaaacatgtgagcttcttgctatgagcaaaataatttttttaatgtaaaatagggggtagcacgctcatcttcctctccagtaataacaaaagtcaggatcgtaaggacagctgggtgctgtggctgatgcctgtaatctcaacacttcgggaggccgaggcaagaggattgcttgaggccaggggttcaagactagcctgggaaacagaggaagactctgtctcagaaacaacaacaaaattagccagacatggtggtgtatgcctatagtcccagctatttgggaagctgaggcaggaggatcactggagcatgggagttcgaggctacagtgagctgtgatggtgtcgctgtactccatcccaggcaacagagtaagaccctgtctcaaagaaataatataataaaataagaccaaaataatcttgaaaaaatgaaataaaaatgaatgctgcatgtagaaacttggaaaaataaaataaaaaagacagtaaggatggagaggctcttcaaaggaaagatgaatggagtgttaaaattacttggctgaagaaatagcaggaaagaggcagagctgcccccgtggtcctggctgggaaaagggaagggtggaagagactctgatagaaacacaaggctagaagcagagtccgtctgaaagacttagatggtgagctagtttagctgcaggtattttgacattaagatgaaaataaagcgcttgcctacaatgaagaaaccaaacacccacctcaaccaatgaatcatatccttcaggacatatacccctggtgcctttagatataaccaacactaggttcaactcttctctggatccatatacctgtcaggcatgtggaaggaccattaatagactgtagcaatctctctacccactggctcacatcagggatgtactgaccactctgcttatgctggaccacaccaaacccaggcaacactaagccatgcaaagtcatacatagaatctcccatatcctaaagacgaagcccataatatattcttgcaactctgcattccagagtccccttcccccacatgtatagtatgcttatagtagtcccttaagcataaagttgtacagaccctaacatggtagtatttgtacatcacctccgtgccttgctctagcactcagagttctagtacaggcatcaagggtgtctgctgcaagcatgcaccagagggctaacgccccaggacagccctccactccaccagtagcagataggagttgatggattcatacccagccatttcctcccttacttggaacaactcaggatttttttacattcccagagctcccagctgccaggcaaagcaatctgctcattcaatgtgttctgtatcagtctccttcccttcccttcttctctcgggctagatgggattaaggcctaaagaccacctatgttagccagagttctccagagaaacagagtcaatgggatgtgtatacacacactgcataacaacattttggtcaacgatggaccacatctaccatggtgctcctataagataaaaatatagctgaaaattttctatcgctcagtgatgtcttagccatcatgactgtcaataacatctgatatggtttggctgtgtccccatccaaatctagaattgtagctcccataattccctgtgtcatcagagggacccagtgggaggtaattgaatcatgggggcaggtctttcccgtgctgttctcatgatggtgaataaatccatgagatctgatggttccataaaggggatgttcccctgcacatgttctctcttgcctgccactatgtaagacatttctttcaccttctcctatgattgtgaggcctcctcaatcatgtgaaactgagtccattaaacctctttttctttataaattacccagtctcggatatgtctttatcagtgcgcaaaaacgggctaatacaacatcatagcagaatgcactatgtttaaatttgtttagataacacaagtacttatcactgcattacagttgcctgtagtattcagtacagtaatatgctcacagatttgtagcctgagagaaataggctacaccgtatagtctaggcgtgtagtaggccataccatgtaggtttgtgtatgtacgctatgaggttcacacaatgacataatcacctaaggatgcatttctcagaaagtatccccatggttaagcaatgcatgattgtatatggagagccaaattcacttaaaggaattggttcacatgattttggaggctggcaagtccaaaatctgctggttaggcctgcaggctggagacccacccaaggaaggaccagtgatgctgttccagttggaaggttgtctgctgcagaattctctcttgctcaggggaggtcagtcttttgttctattcagactttcaaataactggatgcccactttatggagggcaattagctttactcaaagtctactgatataaatgttactttcatccaaaaacatccataacaattttcactaaatatttgggcaccgtggcccagccaagttgacacataaaattaaccatcatacctccattccccatcccctaccagtgtgtcctgcaaccaccactgaaagaaacaacttgcactctaattcttgtaacagtgtctgcttctgggggaacctaatttaaaacgttgtatttttagtatactgtgacttggaaaataaatgaaagcatagaaatgcttagtcctctttcaaaaacctagtgacccatgaaagcacttggcccacagtttgggaaccactgcattgcaggtgctggagtttaatgcctagaaaggcccacgcaatctctaaggccatgtaaacacagatgtttccaaagtcgttgatcatgattttggaaagacctcagcattcctaatagtgacacagatattaggatggtgctgtcaaagaagtccctctctattccattgcatgcccgaccttccagacagttagcaacgttctgagaggttaaagactcttatctgaaacccatcacgtcaccaaagcagcaacgatttcatttaaaaacaacacctctatccaaaggctcagaatctgttcacaaaagaaaacacatcttttgacatgcctaaaaatacatgattatatcctttgtggcaagatgagaccaagtgactcattgaagtcataaaggctgcaaattgcagtattgttgtctttgaatgaaaattgccagaggacttgtgtttcgttgtctcaagaaacctaggcagtcatttgccgcatcaggagatccaaatcatctgaagttgaagatcatctcctcctttttgtatttcattagccaagatcaggttaataaaaagtttaaaagttgactgccttccccaggagatttatttagacctcctctgaggggatgagctgggaatggcagcctacactctcatttctccagagctcactctgtcttctccctctgtggtccctgaagtctgccaattaaagacctcctcgatgacattctgctgctgaagttatgcacacataaatcactgtaataggagaagattgttatgttaacctccaccatgcaacccttttccttttgtgagaaatgtgaaaaacattcatttgtctggcacaaaggaagctatttcccaacagatgcctggaagccttgcctggatgatgccccttcctgtggttacgtaggtggtgcctcctgcaccagcaggcattactcaactcgaaacgcagagcaacgaggccataaaccaggcagcattacgtcagagacagggtgctctgaaataaatggggagctggttctatctagaggaacatttttccatgtttaaccaagcaaaactggagacattactgaacacacagtctcaaaggtcaattcttaaggagaccagtgctggggagggaagacacagtttctacagctatggaggaacccttgaggtggctggagtttcactgttagaacgaggggctggtgtgcagcgactgtgaattctactttgatgcgaaagattgcatcttctggttgagcccctgggagtggcaaccatagcagccatggggctgaacctggaggtggtcaccactgtgtgcttcctcacctgcactgcaaatcttcatgggttcaaattccccagagattcagttttcaaaagagagacagacagagagagagagagagagagagagaatgttttatcaacaacagaatacatattcatgacgcattaatgacttatatctacatgttaactttagaagataatattaattgaaagacttgaaaaggaaaagtctgggcatgagctgagctgtttctctctatattcagttgcccccagttagctgactcaaggctggggtgcccccaggggatggcgaggggggacctgctatgcagatacagcccctcatccagaaactggcttgctttggacaccaaagtggggacaccaaacttgatcaaaggactcatttgcccacccctaaagacctgattttcagagctgctatcaaagggcagccaccttgcagggcaagcccacagcgaaagaaaggaagaaagaaggaaagaaggaaagaaagaaagaaagaaagaaagaaagaaagaaagaaagaaagaaagaaagaaagaaagaaagaaagaaagaaagaaagaaagaaagaaagaaagaaagaaagaaagaaagagagagagaaagaaagaaagaaagaaagaaagaaagagaaagagagaaagaaagaaaagaaagagagaaagaaagaaagaaagaaagaaagaaagaaggaaagaaagaaaaagaaagagaagaaagaaagagagagaaagaaggagagaaggagagaaggggagaagggaaggaagggaaggaagggaagggagggaaggaagggaaggaagaaagagaaatgacagtggctcacgcctataattcaagcaccttgggaggctgaggtagaaggattacttgagcccaggagttccagaccagcctgagcaacatagtgagtccctctctctacaaaacaaacaaaaaaattagccgggtatagtagtgcacacctgtggtcccaggtatttgagaagctgaggggggaggatcacttgagcccaggatttggaggctgcaatgagctatagtcacgacactgcactccagcctgggagacagagcaagaccctgtctcttaaaaaaataatctagttagaggggttggtagggagggaacaggacacaatttctcttattacttatttcacaatcaaaatgaaatttcattctagttcacactacagcaattcacttgctgttggaattttgacatattctgtaaagagtgtccaaaaataaccagttgtacctgattctgttgaactctctgcacctgtccattttaaatctcattttcttatttgctgttttttctcccccttcaaacttacaggtgtaaggtgctttgtttttctgcttttctttttttttttttttttttttttgagacagggtctcactctatcacccaacctggagtgcatggcatgatctcagctcactgtaacctccacctcctgggttcaagtgatccttttgcctcagcctcccaagtacctgaaattacaggtgtgcaccgccatgcccagctaatttttgtatttttagtggagatggggttttatcatgttggccaggctggtctcgaactcctgatctcaggtgatctgcccacctcggcctcccaaagtgctgggattacatgcataagccaccatgcctggccagatgcttttctccttaacctagagtgaccagccatcctggttttcctgggactgaggactttcccaggacagggggctttcagtgcttaaaccagtcccttgcaagccatagagttatttgccttctttaagtaaacatgtaaatcttagtttgagcctaccaaaccatgatcaattaaacacagtatattagtcctttctcacactgctataaagatactacctgagactgggtgacataaacaaaagagttgactgaaagttctgcatggctggagagacctcaggaaacttacaatgatggtggaaggcgaaagggaagcttgcacgtcttacaaggcagcaggaagagagaaagaatgagaatgaggaagtgccacactttaaaaccaccagctctcatgagaactcactcagtatcatgagaatagcatgggagaaaccacccccatgatccaatcacctcccaccaggtccctccctccacatgtggggattataatttgagatgagatttgggtggggacaaagaactaaaccatatcacacagtttcacggttttgcagtagcagatatacaagtacattcaccaggctgtgggaaactggccctatgggtttctgagcagaagtgagaccacgtccatcattgctgagaacgatttccacttcatactgcaggaagaagactgaaggttttcagaggctattgcacaattcaaagcataaaacaataaggggttaagtgaggggaatggaaaacaaggggcagggtaagcagacccttctccacggaggtcttgcaaattgttccaatccagtcatttatacagtcttcaccagttacccgcaggccccatcaaaagcaacatttcacctgaggagccaacatggggtgccacctcctccctggcacatgtggccagagcatcatctcactgtggtccttttattttgaagtaaaatatataggaacaattaaaaaggatggaaccaatgcatctcgacattctctttacaggcaaaaagaaaaaaaaaaaaaccaaattaggcttttgttaccctgacagcactgagaatcatctggcttgtgagcttttaaatactcagcgtataatgaacatctccagccagatccagtgggcatcactcgtggagactggccacagggtacgcccacatctcccttgccttcttctaggctttcaaagggagcctgtgatgcctacatatgaattgcactgaattgctcttgattaaatcactgtaatttttttgttactctatgctttacattaatattagttgaatacccaagggttttttttttccactaatcccaggtccaaattacacttttctcatccagaagtgttgggaagatggaaaataaaaataacgagtatgaggaagaagaagagaaatcgctgatactgagaggttttgctaagcacctggcattttgctgagtgcttctcatgttacgttgtgctctgtgaaactgccattttcatgggtcccatttttatactgtttgacccactacattgtctcctatcatcctcacagcaagtgaaccaatactgtcatcgccctctttttacacgtgggtacactgaggctggagaagagtgtggtccaagcatgtggttgagtccagctgtcccagctctgactccagagactgtgctgctagctgatacccttgagtgccctgccctgacccagttccccagtcttttttcttttcccttcttccccaacctctactctgagctgtaggctgctgatgagagaggacaaacaaataagatggacaagatggtaccaaatccagagtcatgtggacaaggggacggcgtggattgagtggctggggcagttgtaacttcatgctgctgggattggaagccagagcttattgaaggcaagtgcacgtggacattcccagcagaggaggggcagagctcccagggaaccacaaaagcacccacgtggaggggctgaggatgtggcctgggaaggatgccatgtgaccacgtttcctctctgttttccaggccaccgtggctgaccacccaagcatccgagtcaataagtctttcactgagaaagacctgatgccccgcacaatctcgccccaactgggagggttggcacaggctttgtcttctccttgcacttactaaagtttatttaacagtttggaccttgcctgttgaatcttgaaaatatcacaactatgcatatactgtgttctgaagagcttacccgaacactatttattagtcactttgatctaattcatcacatgcaaaaatctcaaacaagcactaagtgtcctttcaaggggacgtgttaacgtagttaaagtatgcctaagcctctgtttcccacggctcgggcaacgggtgccatgggttcaaaaatgcaattaaaagaagactgtcaacttcatcattgtcaaaacgccacatcacccgctaaaaaagaggcgcccccttcgtcaatttccccatccatgccaaagttttggagagacccttcactttataaatcaactcacagcttagaacatcctggcagccccttcaaggaaccgatcggaatgacagggaaagagaggataaccatcatagcttgactggatacaggtgtttgcgtttacagacgaaccacaaacgcctggatctttgacaggcgttgatgctatcagtgaatcgcagctattattggctccggtcaccaagggctcgggggcctttcccttagcaacatctctgaggctgataacatttggctgaacttttcagattttaacctcccttctgactttctgcagtcaaacccgcctaaactgatcagaagaagagacacgcagtgggaagacaagtaaaatattattgactggactgtttcatgtctattaggaagaaagagcagaggggggagggagaacctcacggtctgacaggcgtcaagataatcaggggaggaatcggggctgctcagtaaccctcagtgaggttggaaagcactggcttacaagaggtcattgttctgcgcggggaacaaacagggcgccaggcaaacaagggcgcaattgcattcctctacgggaccccgttccttgtcagcaggccctgctcctgcagcaaagcataggatgggaaacaaaaacaggaagtcgcgtggctcaaggaagaggcaggggctccgcatcctcatccaacggctttggtttctggaagcagcaggatgtgctgaccctatatgcaccctggtgcgtggggcctttgtgctgggcagaggtgggacccagagggacaggcgatgctgctctggaaggatttggctttggcaattggtattttcttgtgtgtgtgtgtgtgtgtgtgtgtgtgtgtgtgatttatttttaaattttagattcaggggatgcctgtgcctgtttattacacgagtatattgcatactggtgagaattgggcttctagtgtatccattacccgaacagtgaacattatccctgatgggaaatttttcaacaactgcctcactcgcactctactcccttttgaaatccccagtgtctattatctccattttatgtccgtgtgttcccactgattagctcccacttataagtgagaacacacggtgtttagttctctgttcctgcattaattcacataggataatggcctccagcagcatccatgttgctgcaaaaggcataacttcattcttttatatggctgtgtaatattccatggtgtgtatgtaccacattttctttatccagtcaactgttgatgggcactaaggctgcttccacaactttgttattgtgaatagtgctgtaatgaatatattatataataatatatgtagtgctgtaatgaatgcaagtatacattataatgattaatatatacttgatgaataatataatgatttctttcctttgggtagatatccagtagtgagattgcaggttaaatggtagttctgttatttctttgagaaatctccatactgttttccgtagaggtggaactaatttacattcccaacaacaatatataagcattcccttttgttcacatccatgccaacatctgttagtttttgactttttagtgatagccgttctgactggtgttggatgatatctcattgaggcaactggtattttcaatttgcatttcacttccctgctccttgttctgctgttcctgacggacctccttgcttcttcaagttcacgtcctcagcctcctggctgtgcatgcccaggctcaggtgtgcatgttggggagcagctagaagggctccgcttcctctcagtgaccttaagtccagttgccaagacctcctgggactccacaaatgggttgatgatacaagacatgcttccccctgcccccaaacctactggagaggacaacaaaccccacttgctaaccagtttgcaagaccgagcttgccatctgaagcagaggtcaaggtattcagcactgataaagaaagctggaacagtgaggccatgccctgccctgcctctcctttcctccctggaccactttcatttttactcgccccttggttctgtcaggtaaaaccaaccacagacactgctcaaggaggtcccagaaaacctatggaacattccccaccatcctttgggtacaattcgccttggagccatctctctttgaggactgggcttatttcccccaaacatgtttccactctgtattccagcagccctgatctgtgcaaatggtttgctcacggccatccaagaagcaccatccttttgttaggggaagcacctgatgcccatagaaccgtgtgacttgtccacttgagcttctcaccactcagggtgagagggtggggtggcatttcagaaaaacatcaggaaagggagacttggaatcagagaatggcagtacagaaaggaactaaaacatcaccttctccaattatttatgccacatgtggggaaactgaggcacagggcaaagaagaaagaaacccttgggtttacacatggtaaactcccctgcggcccgtccctgcctcaccgcatggcccggctttgcagtgcattcaggcatgcgggtccatccatgctccagacacgcccagggtaggccccacctgcaggggcactcgctgtctccctcacagctgaccaggctctaccgcagaccttcagctgggcctagatcagaaacctggagccaaacaagctcccatctccgtaacacatgcagttggggggcctgcaatgcttcctccccacacccggcccctaaacttactcttatttccatctcttactgtggtcttgcgtgtcctctttcctaattcttcccctgttaatcaccctcccactccctgccacagagccttctagaaccctggttctatgacattatgatgatgatgacaacgatgacgatagtggcaatcatttattaagcattgccctggcctaagacaccacatgggtcatttcttccaggctccaacttgcttctgctttgccatatggtaacacgccgtattatggaagcaccatcattaccgccatttgcaggggaagcctaaagaggtgaagtatctcgctcaatctcatgcaagaaagccaggattcgagcctgcgagctcttccacttcagccaccctcgcccagcattgtcccagaatagtgtcgtcaccacagggtggagggacgggtctcagaactctaacatccccatgtccgcccctcgaccacagccgcctttcctgccagtcttcagacacctggttttcttcccagagacctgcagaacagtgatgccagccccttgccccttgcatcagtccctcctggcagctcctccctcccatgcagcccagaacccacactggttcataagaacacactggtctcagctgggcactcagttatcccacatctcttccttgtccttaaacctacagagattgcgccctgctcacccctcctcctcccacccatgtggctgggagctaatggtaagaatctcgccactgtgtagcactgcatgtgggcccccatctccactgcaccctaggtccctccatcagggctttctgcctctgttttcagcttcctctttcattcctcccagtgctcttgtgacctcatccttccacctacaaatttagcaacattcatggcgacgccttcctgccagtctcaccagccactgaagaccaaccttccctccttgctctttcctgttgcccatggtcctctgtctcctccactctgttctccccaccaccaacagctaaagcactcctaccataaaccaacaaactaaccacccttaacatgatgacctcctccctctcactcagtccagtcatcagtgaccttcccataggcagatctcagacacccactcctcagtccttgtgtggctgaacatctctgctgtgttcatcaccactgaacactcctgccatcttgaaactatctacccccttggcctcgggttttcttccttcctccatgaccactccagctcatttccacccatggctccctcgttcttgacctgtccctggttggtggtggtccccaggcttccactgacaacctgccccgttttcctctgccatagctttacctgccaccccaggtgctaactcaagctcttcccaaagattttggcttagctccaaactggctggatatctccagttgccttcggcaaaagaatatgttcatgacaagggcccactctcttgctccccaaggtgatttgatagtgtggtttcggattacagcctggcttcctggggtgatccatcacaagaataaagagtactgataaggccaatgggtgcacttccatgtcaggatggttgtgtttctctcggcaaatgaatgggtagtttccccagcacctgcaggtggtgagagttggtctcagctctgataacacaggctctgccaaaggtgtgcccttgggctttgggggatggaacggagtcagtgatagtgtgtggtggtgtccatctgtccttgctcaaagccgatctccacctgcacctgttctgaaccctagctctggatgaagagagcagttgagtgttgatgaatggacagagccagcccccagctcttctgggctcactgtttgtgggggacttatgggcatgcttgagccatagggtggttgcaccccggcccacagggcaggatccccatccacattcacctcactagaaatgaggcagcccttactgtgtgaaatgtcacagcgtgggggagtggcggtaggcagccactgggaagaagcaccctcctcaagcgggtttgatgtttctttaactctcaaaactgctgcccatggtttacaaggtcatgaacaggaaatgacacacagcacatgcctctcatggcagcacctcctggatactccatctggacctgaaaatgcagaaggaacagggggaggaagtctaaccgggaagccgcctttcagatgcccactctgtcactcactcactgcgtgaccttgggacagtgaccagctcttccgaagctcaggatgcttatctattggacatttactacaatcccaccctgacttctcaccaggttgactcaaggttctcctgtggttaccctcagagctgtcatgagtgagcccagaggatgacggagccagtaggggtagtgtcttcacaatcctcaccctggcagtcccgatgtggtcccctctgctgatcccccatccatgacaggctccttctcatccaacaggctttagcccaggagtcaccgcctcagagtggacttcccaccactcattccagtgcagccgccaactcaaggcactttctaaatgatgcctctgttctgttttttgaagaaagtctcaaacttaccttccagggaaactgaccaaaccaagaaatgctgaccctaagtccctcctggagccaagatcagtgaattcctacatggatcagatgacgtggcctcttctttgagcttctctccaatgctaatcttctagttatcaccaactagaggttttttaatttatgtattacatttcttgcttgttatctggtggtctgcaaggtataggtgtatcttagccactgaagtagaacctgactggctcatagtaggtcctcaataaatattgactgaatagctaatgaggggatgattgagtggacatcccctgtccgaggctcggatacctggacttgatagaccctggttcccaggtctcagtgggttctgcctcttgtcgcctcctttgccagccacttcctcaatgatggagagagccgaggttcccctgctggatgcattttccgtgaatttggggaacacaagacactgtcaagcccacagtgagctctgagccctttcaggagagccaacccttgatacagtcccccaggtacccctgtgagtttttctcctataaaaaatgagaaatctgtagctgggtgcaatggctcatgtctgtaatcccagcattttgggaggctgaggtgggtggatcacttaaggccacgagctcaagaccagcctacccaacatggcaaaaccccatctctactaaaaatacaaaaatttaccagatatgatggcacatgcctataatcccagctactcaggaggctgaggcataagaattgcttgaacccaggaagcagaggttgcagtgagctgagatcgcaccactgcagccactacactccagcctaggtgacagagtgaaactttgtctcagaaaagagaggatcttccattgtaaacatgaccagaccttacccaagaaagaaattccttttgatgcctttttaagcagtgtactcaactaccaaacagagctgggacttccgtccttcccaagccactcctgtagagcagagacaggcacctgtctcttcataagcccttctttctctatagtctgatttgatttgacctgtgcgataactcctatctgtgtctggtatcatcactcgtgtctccgaacatttcacagcagtgactgatgcccagacctccggctagatggtagccctgactgtctgttatctgtgcacctggtcagcctctctccacttggactccagcctcttgagggactaagcttgcaacacctcacatcaaatagaccaacgagccaccttgtttggctgaaatatatgttcattctacaatttggccatcaggggaaggtaagaaagaagagaggcagaaaaacagacgaaatgaaagggaaaagacacacacccagcagcagagaaaagacataggaaaaagaaaaaaaaaaccagtttaagggagaggggaaaatgaatcatatacagaagcaaaagaagattaaggggagaaattctctaagatctgctgtctataaaggagtgacggacatgaggtgaggattatacggtgctgtccacttggcacaaagggtgcaaagtcctaacatccccctgccacctgcatttcccactacaccatgctatgaatgagtctccattccagctcaaacatccctgcaagctcaaaagtagaaaacttgtcctcagatgcaacaactgttgtcagagcaatgttaccctgagttgtgaagaaacctaggtctgcatggaagaaacctgggctgccccagtccctggccaaaggtttgccaagcaccctcagaagacctgcaattgtcaggggaagtgaacttggtcccccgtcccccaaatccctgcccgttctcattgcttcatagtccagtgcagtccccgacccagacccaggcctcccgagaagccggtgaggtgaagtcattggagggagcctcatccctgatgggtgggcacagggcctgtctgacttgcccactcatatcactcagaaatctgaggaggtggtgcttgaggggcagtagaatgaggctccaagaagtcactctcatctctgtgggccacgccagagttcaagactggatcttcgctccaatggccgagggatctctggaaggtcccctttgccaccaaaagcctgcccttttctgcatgttttgaaaggagttttcctaaacacagcctcctccatcaggaagtttgaatgtataaacagtgactcttattcagaaaagcagcgacgagcagttttatgtaaaagttacatctccatttaagaaagaatatataattccacattccactgtccctcgaactttattcccatttatgtagatcttaatacagttatatagtcgcggggctaatgtcccctccggatggtaatgaggtcctctcgaacccgttagctgctataaagtatgcagaagttaaacgcacagatggaaaaaaatttgtctcaattttatacttctgcaaaatggtaattttgtacttaaaatgtacaagatggatgttcagaaatataggctgatagcctaaattatatttggtcataatttatgtagtacagtcccaaagagatacaaaaaggcagagcataatttatctgctggaatcagcgatagctttgctaaaactcccatttattccatcccccatagttttaagcagccttcgtcctcagggctcactctatttaagttttccatactgctgtttgatcacatattgtactctataatttgcctatcatctgaagcaaatttaggtcccagaagttatgatctctacatagcaaccactttatttggtaaatgcaaaatatttatagcaatataaaaaccagatgaaaataaaattcctataatcattggaacatacacactttatcattggggcttgtaagaccattagagtaagactagtatgttgactaatacaattacctttggacgctcactcgaatttgctgatgcttgggaactggagaaactttttctccagcatcccttccatcttgccaatggtgaaaaaacaaaacaaaacaaaacatctgggcacgggctccagagagaattgccccagaggaaatgagttgaaaagcgaaagtcagataagtcatcactgtgcctcagatgtggaaaggaatttccaagtaaaaacacactgcttggcaatggcactgccctggatgggttcacctcttaccttccagggaaactgaccaaaccaaggaatgctgaccctaagtccctcctggagccgagatcagtgaattcctacacgaatcggatgacacggcctcttctttgagcctctctccaatgctagtcttctcacacctctaacttctttgtgtgtgtttgtgtgtctgtgcttccaaaattgttacttggagatgttcaggctggaacctacaacatgacacagtccatcaacgctcctcgcaaagcaacgagctcttcaaaacagagtggagagagaaaacagggaagggacaggccccaaactgaaatgtgcacatgaaaacctgagggaataacgttactatgcatattcacatacacttgttgagtgtctgttctctgcaagcactgtctaggacagaatgctattaggacagaatgctgttcaaataagtgttcaggtgactttcgcttatgcataggaccctgccctaggttctttctagtcctcagaaaaaccctgcacagtagggcttacagattaccagtattagaaggaggaaattggccaagggtggtggctcacacctgtaatcccaacactttgggaagccaaggcaggcggatcacctgaggtcaggagtttgagaccagcctggccaacatggtgaaaccctgtctctactaaaaatacaaaaattaaccaggcgtggtggcaagtgcctgtaatcccagctactggggaggttgaggcaggagaatagcttgaacctgggaggctgaggttgcagtgagcccagatcacaccactgcactccagtctgggtgacagagggagacttcttctcaaaaaaaaaaaaaaaaaaaaaaaaaaaaaaacaaggaggaaactgacggagggagaggtcacccagtcaagtaagtggtagaggagagagtgacacctaggactgacaccattcaagccagctgtatctgataccaaacaagccccctgttgtacttttctgtatgccaacacagaacaccaagcttcccgaagtgcctatgcagggatattgcttctctgtcttcagacctctccccgcccacctcaacccccttccatccgccctcaaggttgccttcagctgagtgaagatgaaataaaaccccagctgcatctctctgataaaaacttcaactgaagcctcatatattttgtagatactaaagatctcatggctctttgaagacgagtgttgtattaatcattgtggttgttcagattatttcctcatttttaacattgctcgagccctctaccacagagccaccatttctgtgtccagggtagtgaggccctaagagataccctagattcctctttatagccacttcctccttcattgcaacttagctccagctccagctccctaagtctaagggaatctccccatttttaacttttttacccaaaacatgcttaagcagaaatcaactgaatgcatatttgaatagcattctgttctaatccaaatattattctacaaggtccattttaaagtctgttttttcatatatcacactggagggagagagagaaagaatatagctcaaaataaatgtgtaaaaaaaaacgaaagagatcataagggcagaggaaataacttggtctaatttatctcctgattctataattatttcaaaaccaaatacaggttcctaaagtatcagtgtggaaaggagccctaatgcaccagaactgctcattccacaactggggaaactgaggctcataagagaagtcttacatacaccagtaaggagaacagctaggtctctatttgggtcttgctcggtagcatgtgaacaatgtgtctgttctcaaaaggcagtaactattgcaatcagttgggaactcaagaatatctgacatatgggaccatccatgacttgtctccagtcctcttatagcctgtgggcagggagatgggtttcatttgcctattgtctgttcatcagcactcctccccatgcaagggtagaggaagcaagagggtatgttgacttttatcaagagcctgcaggctgggcatttagtttgagctttctccctctaccttcaggcaatcctatgcatggctccaacgtgcaggtgaggctcagtcaagggcagtcattttcccaaggacacacacaaccaagcccaataattgataatactactgtacaggttacttcagagaaaggaactattaatgttgccttggggagtaggaaacaacattctagttgaatcttctaggacgggatggtatttgcatgcagaggacaatttgtgggcagaggtgctaaggtcccagtaaatatttaggatggtgtttgcacacagaggacaatttgtgcacagagctcctaagacccctgtaaatatttgctccatgttcacagtccaaggagggagaaaacgtgcaaaggccctgaagagagaggctttaaaaacccacaggaagctctttccaagtgttgcaaagggaatggttgttcatccttttcttaggaatcgttcaacctagccctgcctcccagccaccctgcagccaggagctctgatgtgtgatattatatagagttcaggaatgtgaaaggcaccacataaaatcaaattctcttctattttaagttgagtggtgcatcagttcagctttaaaacctgatttcttaaaagtttcaaagggaaaaaaaatgttcctttgcaattggaatcgagtccacataaattagcaggccagctctacatatccatctttccgaactttcctggattgttcattttaatcaagcggcccacattcttgacttttcatccttcactgcccagaatgatgcactgcagctactgatgacacgcaaatgttaattttgttcaagttcaaacatcatccaaaaagggcctattttaaagactgctttgcaaacaccagctgaaaatgaggatgaaccgaatcaaacaccgccaagaaattcagaggagggaaagctgtggtcttaaggaaactcacaagtttttttttctctagatcctcaacctctccaaggccgagagtagaatccttgatgtctagagctggaagggaaatcagatttcaccccagccctgcccaaggtcattcagtgtggtagggaagggacgagataattcaactcttcccctgggtaaaagagccttcctaaaatgtgaaaccagtgaaaccatgtatttcaagtctttctgtcatttagtaggtttcaggagcagcaggatacatcacacacacacacacacaggcacaggcacacaacaggtttattttagaactctggctcaccccttaaccaactaccacttcctctatcccgtcttcttcagtataggatgtcactattgcccagtgagggcacaagagtgacagttgttcagagatgcttcaacaggaatcgtgcacttgaataaggagaaatcagccaagttcctatttcttcatggctgaaattgtctgagatttggcatctgcttttttgcctttgcacccaatgaagctgcatgagaaaaggacatcatctgtatgagtcactaccgcatccccctggagcctaaaacagggccttggtgcctcgtgagcacccaatgaatatttctgaacaaatgaagaaatgaaatcactctggtctattatttaccaggatccttcaaagcaggacagtactatggaaggtctcagcatagaggttagagatctgagggtccctaagtcgttgagcgccatctcacagcaacatggccctagagaataaatccatctgaaagctttggccccagggatctcaacggccttgcctctagaataccagcctcatgtaaacaagccatcggcagtgacaagtaccagtttccatggcccatcagactaaactgttcacagtggcggcccatcttctgaaagaacagaaaagacactgcaacgtcaagaaaaaaatgactgccgctattccctgagcgataacagccgctcttgaaatgcaggacatgtttcatttggcttataataattgtgtactgtcttttaaccctcaaagtgttaagcattgtcatatcctctggggatgaaaagatctggggttaacaactttctcttttaaaaattcataaaggtgcaaataaacagcattgcatccagtggctatgcattgcaagaagccaagggagaaagaggaaaaaaaaagaccacaacaacaacattaccccccacaggatacttggcaattaactgcagctatgtcagcaattttttgaaaaatttcctaaacatggagaagactcatcctcaccatatgaaaaacaaagctactgcagtgactctcccatgcattacaatgtgtgtgtcttacttcttaaccaagccgctaatcacgcaaattattgcaactaattacatttgaaggtctaattaattctttcagtaccacatcatttagtacgcattcacaacacagcacctgttttgaaaatccttgcagttaatttgtttataaacaaacactatttgcataaaatgtttaatgaatggtttaacagttagtacaatactccagttttgtcttcgtagatctgaggtcatcaaaggccacgataaattaattttaaactatacaaattaatttaaatagaatgtgtgaatttctcattaataaagaaaacattttcaacatgttaattaatatctctgtaacaggctaattgcttcctgcacaacaagtacatcttacaagcaaaccttaaagatttggggggcaaaggggtggggactattttaaaactgcaaaacaaaaagtgcaattcagaaaaaacacacacagcccgattatactggagaattcaccacttaggacaggcaaaccaagaaaggaagctgttgccttatgttacaaatacaacacattttagtcatcgagaacgggacggttgaaaaacatttctatcacaggtgcagttacgctgcaaagatggttagatgatgtctgccttctggtagaaagacagaattaatgaaaatattagttctgagagtgaagatctctcctttgaatgtagggcatattagctgtgtttgtaacccaatggtaaatacggatttcattaaacaaatctgcatcttcacaccagtgtctgaggctcagccatcataattctccctgtggcaaaccatggaaagatacttcacgtagaaactaaagaggaacaacattatagcccaacatcaagcacagcccttgcaaaagccgtcactgagatatgttcgcccttaagtttgtttccgatttgcaagcgttttcacatttgataagcacctgttgtaaatttacatccacgcaggaagtattcttatgctagggagctgagaattgtaaagcatgtttatactcttacccttttgtggtgttgccccttaatgcacaggctgataaaatgactagctacacaggacccagagggatgtgccgctccacctggttcccgccgcatcttcccccgaggagccactagtcccttcctcctggaacaggttctgtcagcactgatcaacaagcacttggtttttgttttaagtttgttaatttggagaggacatggagagacagggagcgagggagagagagagagagtgtgtatgttcagggtgtgggggtagaacgacagaaagacaaagagaagcacaaatacagacttcccaacacttttctgggacctgccaatgtatttccaagaaaacaatggaaaaacagtaggagttccatcctgatagcaccaggggaaaagaagaatttgcccaacctctgattggacccagatttccagggtggtgctgctactcgtcagaaaacacttggccacatggccccttggtcctgatatttctttggaggtgtatatagaataagactatcccaagcaccctgctcccaaactaccctggtgaacccagtatggtgtgaaaacccctttgctttgctcttttgccagataaatgccagccagcatccctgtctctggggccctggagaggccttcaacacacctggcctcactgccctgtggcttcaacaaagaggccgagcatctcctataaaccttgaggtccatggatgacatagcggaatgatggatttcagaaaaggcaggtgcttcccactctttaaatttttgtttattctttccaagtttcccatcaacagccctgcagtaaaaattcagggcttcagagacaaatatttcatgagtacagactgtgatgaggaaaagcaagccattccctctctatcaggatccagaggtaagctgctgctttgctcttaaaacgcaagaaaaaaaaagtgattaacggttggcacaggactcaggattatacgccatttccatgttgacttctttttggaaaagatactcaggatagccatgtgaggagttactccgggtttcggccccatagccagctagaactgaggttcaaggggcagagggtgaactccccagcagagacagaacggggcaggaggggggcaggaggagggcaggaggcgggtggctgtcagacaaaatgcttccatcccagaacaagcagaaacaggcgcaccactctgcaatataaaagtcagaaagccttgcaacctagatgcaacccagggacttcccccttgcagccagcagccaaggcagcttctaggcactgtgtggctgtatttaaacccaacttggtccctaacttctctccaaagccggtcaagttgccccaccctaagcatccagatgacaggctcctgcctcccctcttgcacaaaatcattcccggatgtagagcctggctttttctctttacccattaaaaatcaccagcgttttgcaaataaaggcgatcaccatgtgaaaaattatcttttaaaatggagtttaatttgcatataaggaacgagagatttatgacaagcaacatcgtccagtactgcatctgcctagtatcagtcgtaatttagattgtttgtgactgatcttaaattctaaagcttggagaagatgaagtactctgttgctgtattattgtcaggagtctaagacttaccagagatttattagtaatcttatcacaaacatgtctcaagtttttgcttttaatatgtgccaagctcctctgaggaattttcctcactgcaattatattcctcaatgcctgcattctgaagctgagttgatttccttcccaaaataaagcgacctatcattacaccacagccgctcttgtacatttttcctctgctacttaataatcaatgtattcatcattaaaatctgagccctgaagcaatggtttttagcatattctaatgactagcgacttgcaaattacaatgacctttcatgtacattctgtaagcaccttgttctaatgtgtactgtatttatagtttgccaatacaaactagccaaagattggataattactgtaatctattagctcgattgctttccctgctcatttatagcatgtgccacgcaggccattttcaaaaactggcctatctttcatctcccgcaagctcagaaagtaagggatacttcatcttcacaatatacacacttacaaatgtctgaagaacagcccgtctcagctcaaggaggtttcaaaaataaagaaccttctttcctattagtgtcataatgctatttgtgactgacaaaaaacaccgctccgagaatgtaaactttcattgaagaatgtcaaggccagtcccattttctgcccattactctgacctccaaatagcatttaataagatctgctttgaaagaaaaagataaaggcacttcccttaaacaagaaacaattttttttgttataagtaaatgtttcaagtgaaatattaaactttttcttttcttctttttcttttttttttttttttttaagcacactgctgttacgactccagaaccgataaggaagctatgtgtggaagtatgagctcaggtcgccttctgaccctctgtgacggtctatttcaggcagttatggatagataacattacagacactggtaattaaaacaacactaattttgtctctgtggtcacgctttgttgttagaagccatctatcatggccttcacgcatcacgcaatgagaagacatttgtctacgtacattgtgcttggtcaacggttttacggatttccccgcgtacctggacacccaggcacttttaaagacgtactgccttcatttctactctattactctgattaataaaacattttgcatgcttcatcaaaacaccctgcaagcttttcaccacatatattcatggggggggaagcaatgttaatttctttcccttttagaaagaaactaacaacaacaacaacaaaagaaattctcttttggattggaagagagaaagaaaaattcaaatatggaaatatttgtcttccctgtaaaacagagtccagcctaatgaaaagcataatattaaaacacacacacaatgccaagcatctcctttaaggctacacgtatttttgactatatgtatcgttagttcttttctgtgcattcatttgcttgatttatggacactcaatttcacttcaccttttattacaagatctacagttacattaagagtaatagcaagtcaaatgtttttatatttgggcaattaaaaaaaaagaaaagatctattccttgggcccttataagaaattagggatagctgaaatgcaagatgactagtttagttctgttgtaatcaactaagaagaaactgtaatggtgcatttcaagggatctttaacaagtgacacaaacaagagaagaagcagacaggaccatttaacttcaaactccaccgaagagagctgaattgtaagcttcctacagcaagcccggctggcggctatgtggcagtcttcatttctcagcggaaaagccactcccttgagactctccaggcaccccccaaccgcattttttatcaagtgtctaaaaggtaggagctgttagaattcttttctctattcacagatgatcacagcccttttttcccctttagcttgcagacgcacatgtagtttcaaatattagctagaactccagccctcaccagcccctaattgctctctcagggaaggtatcataaactcaggtatggctgacacagatgtagcttcaactttatgcaggcaggaatgctacatcaaagctatttgcaaagtgacatagctagttgtttaaaagaacatttttattatattccttggaatttgcattcttctagaaaccaagtgtattttttaacacggcctcagaaatgttggggcaattgaccattcatgatgtctgcaaaggaaaagcatctaaatatttttcaagcgactttaataaatttgagtgcgtctgtcactacatgtaacctgattatttaaataagttaatattatcacttctcttttgccagctgctgtaagcagtcggctgctgtcattaagcaaaaaggccaagacaatgtgagtttatctggtcctacctgcatttctactcatcgttggactgaaacaaatgggaaagaaaaacttactgacttttggcgaactacaaaggttaactctattcatcatggagaaactgatactaagtgctttctgtctgtccatatattctaaagatttagaaggaacctggtagtgttcctgggagacagaagacagagtgttcatctttgccatatgcagagtgtctcttgcagttttctctttacctcactggcactgctgaaatccttcttagactacagagttttggaaacaagtttatttttcaatgagttaaaaagccaaagcttttctttcttaggatctttaactcttttaaggtaagtggcagggtttgaagctgctgttaaccgtttgaggagaaggagctcaatagcttgcagtgataggaagagaattctcatcacccaggttgcaataaaacgtgcctctcccgataccagtaaagcccactccggagatttccagagactgttggaaggcagtggaaggtaaacccagaggaaacacaagataaaggcaaccaggtggcctggttcttaaatcttaaagcaacagttccaaagttgagagcccgcattgcactctattgcacagcctgacaggagaagggacgaggaagttcagaacctggcaattggagtgtttcccagcgccgggtcccaccgcgcaccgcaccgaacaagaaatctttttcactttctataactcatttgcatgaatttacttttttgccttaagaggttgttgtaatgtgtgttaaaacacacagtgcaattttatctccataatatcacaaaagaaatattatgttagtataaagttaaaaaaaaatgctgcgagatcctgcagcacggcgagcggcaaagcgttgctcaaaagcgccacccaaaggcgggaggagtgtaacggcattcagggaggatcgtttttgttaatttcagcaatccgaatgtaaaaaatgacagcgccacgcaagttgacggaggcttttgattgaattgactgattgcctcagctgcacctgcggaaaattgatgacaatgctgtctaaaccattcattaggatttgaaacttcacgcagatgaatgctggattcataaatttgctagacatgtgttgtagataatatgacaaagcactgttttcaaatgaacatttctttgacctaattttatcaaaatcatgcaaaggaatgaaagaacatttgtacccgaactctttggaacagctgcaactgaggtctctctctccatctctccctctctctttctctctctctctctttaccttttttgtctttcaaataaatttaaatgaactatattgtttgaaatatatattctagtttatttaaattatttttagaatggcaaaacatttatttttacttattatgaacaatgttactctccgccagatgaaggaaaattattttgagggtttttttcaagctccaaatttgctaaattgaacacaagtggtaagtagatttttcaaataatattaataacgcgatctccacagacatgttggggggaaccgtttcagtaccaactggacatgcattctgtgagaagtggacttcttgcaggctttgaagggaaaagaaattcctgtaaaatattgacgcttttggtcaaaaatggcgaaaccagaaaaaaatgacatctgtgtatattgtatataagatttctgacttgttctcgattttaatgtatcaaaacactatcaatatttaatggagctttctctgtgtgtccaagaaagaaaaacaagatgtctgagaaggggaagggagcaccgttttcatacctggcttggcttagctgcacgagagaagaaaaggccgtggctgaatccatctccaggagcagctgtccccctgcaccgtttgaattgcgaggaaagagttacagttttagaaaagaatacctggtatttaagaattcgaatttctcgctgcagaactagatctcacttctacaacaaggaccctctgcttagtacttggactcccccccaaaaaaacaaaatgaatatttattaacgttagaagaacctggcgcaggtcggtccgtgcatccgaatctgccaaaacgcttccaaatctcttccctggcatttaaaagaaatctatttttatacattctcatgaatttgggttttactaccagtaaggtaatttctgattaggcatcttgggtttttctctctcttttttttttcttttttcctaaagaatccctgcaaatacacccgaggtgcttgagttaaccccacacctggatggagagaaactacaggtgtgaacggcaaggctaatagacttgagttttgccacgcatttattcttctttttttttttttttaccattctagcagttactttaaactggaaaacattattccaacaatccaaacaaggctctttaaggctgctatgcccaagctgctacagatacaaaattatcaagtagacatgtgaaaccccctaaatgcggaacaatctgggttggcttctaattgctatgtttcaatttctaatggggaaaatgtgtaaaacaaataactgggtattgggagctctgagcactaaaagcagaacattcttgtatttcagtaaatcatataactctacagatgggtttggaaagcctgaagctccagccaccttttagactatttggatccagcgtttgcttcgaattccgggcaatacgcttaaaacaaattacctgtttgtcttggatggcctttgcaatgagaaccctaggcctgcaagacctctgagattcattgacctcaccagcccacccacaaagaaagatacgtggatactccctgtattgcccagtcctggctacaatggcagggaggagcaggcaaacagcctccccgtcaaagatgttacaatctggtcaatgtacactggggtaggacacgtggggagtcaaatatacatcaatttctggcaacacacggcaagaaaacacagatgcccaaaaggacatcaactcaaggttaattcttagctctcacagaacgggggaacttgggcatagttaagcagcaaaagctttgggggaggaggtagcagagaatgtgtagggcagagatgtgtatatatgtgagcctccaaggatgcactaactgtgcctgttctttctcccttggttactacccttcctgctcttctggtagggttcagccaggcacagacaagagtgggcaaaggagcacccagccttgctgtgctcacccacgcatatatcctgcctggcctgggcagtcacctgagtttgtagcccttggagatgcacttgtcaccctctattctgacacctttataggaacaagcctttagtctcaacaatgagaaaaaaaataaaatgcccttcctccaagagcttcaactaagaatcatttcattcatcctaggcattctggtaatgtcctttttccagttccttgttctaagaaatgctgcattgtaggcatatttaaggaatctacccttctcccaccctaacctcctaagccagaggggctttttgttcccttatcctgtgtatcccctcaaaactcactcaaaatcttcttgtgtggtcagaatggggatccttttgagcttgttatgagacaggctctgtcctcactggggtctcaaatgctaaattaatttttatgtctctttagacacaatgaacaaaaaccagagcttttgaatacagatttccagtaaaaccaaacccagcttgggtcagatgcacctttccagcaaccaccatctcagcaacaacctgccagctgtcaactggaagttcagcttctgggaacttcagcccccttctcagaggagcaaggtcctagcaccaacagcacctgcagtggagcccaagtatggctgcttcatggagaaggcaggtaaagaggggtgtgcacactgtctcagggtggcaactcttattgataacgaaggcattgtggccttctgacgggtactgctgcccactgacaggtacgtgacagtacctccagctcaggtcagggttaggtctcagagacccttaagaaaatggtattccaggccaggcgtggtggctcacgcctgtaatcccagcactttgggaggctgagggggcagattacttgaggtcaggagttagagaccagcctggccaacatggcaaaaccccgtctctactaaaaatacaaaaattagccgggcatggtggtgggcgcctgtagtcccagctactcaggtggctgaggcgggagaatcacttgaacccaggaggtggaggttgcagtgagccaagatcatgccactgtactccagcctgggtgacagagttagattccatctcaaaaaacaaaaagtggtgttccaatcaaacaatagataattaacactgtgttccagggtcagatctggcagttgtgttggacagacaacacaggtagaggagagagaaaagaaaggaagaggttcaggccaggcatggtgcctcatgcctgtaatcccagcgctttgggaggccgaggtgggaggatggcttgaggccaagagttcaagaccagcctgggcaatatagtgagaacctgtctctccaaaaaatgaaaatagcacggcgtggtgatgcacgtctgtagtcccagctacttgggaggctgaggcaggaggattgcttgagcccaggaggttgaggctgcagggagatttgattgtgtgccactgtactccaacctggatgacagagggagaccctgtagaaagaaagaaaaaaggaaagggagcgggagagaggagagaaagagagagagagggaggaaagaaaaggaaaggaaaggaaaggaagggaagggaagggaagggagaaagaagaaagaagaagagaaagagagaaagagaaagagaggaaagaaggaaggaagaaaagaaggaaggagggagggagggatggagggagggacggaagggagagagggagggaaggaaggaaggaaggggggagggagggagggcacggtggctcacacctgtaatcccagcattttgggaggccgaggcaggcagatcacgaggtcaagagatcaagaccatcctagccaacatggtgaaaccccgtcgctactaaaaatacaaaaaattagctgggcatggtggtgggtgcctgtagtcccagctacttgggaggttgaatcgcttgagcccaggaggttgaggctgcaggagactcgtttgaacccaggaggcggaggttacagtgagccgcgatcatgccactgcactccagactggcgacagagcgaggctctgtctcaaagagagacagagagagaagaaatgaaaagaaaaaaaaaaagaaaaggaaagaaagaggttcaacaggcagagtatccttaaaaaactcacccagcccctccttcatttagataagaaaatggctgagaagtggcagagtcaaagttccgatgcaggcccatgggccctcttggttcacctcctccagcccaggcttctaaaactacttcccatacctgctgtattgcagcaaccatgctaatttagcaacttcccatcccagatgcataaagaagatggaaccaattcaccatgaatctatccacccaggcatttagacacaaaggtgaaaataacaacaggccctgtcctcgagaaactcctcgtccaacaggggaagggggagagtgccagtaaacagggccgttgagctctgtcccagcagtggggacaggcttgcatagaaccaccctcactcctgcagcaacttccctcatgccagacaagaatagagtgaaaggagacccccaccttagctttcttggcctggggctccatcctgctgtgcctagcaagaacacaacacacagacacacaccaatagatacatgtatcttaccactactgggggagaaagaaaagaaaaaataaatcactgggaaccgcagcagggtgagaacccagacctcagcaagtcccaatttcagaggtgacagcatctttaaatgccgcaggagtgcgctcctagctgaggcaggtgtgtggattcaacagttgaccccagctgtcgcagagcgcgaggaagctgcgcagtaaaccccttacatatcaacctctgaggaccggtttttctgcacctggtggtccttctagacgtctaggaggatcgtgttctcaggagagggttcttcagcatctgtgctgaagaacactgccccagcgggtcacatgcaagattccaccttcgagcaacatagctgacactctgcagcccagttgtcacttgtaacaaaccccagtgggtcacatagtgaggggaggcaaggctgcgtaaggcagtggctgaactatcccagaaaacaaggatcacaggcccccagtgacaccaatgttgcagaaacacctgcagtggcaagtcagatgtcctccaggaccaggcagataacaaggagtaggggtctgcagaggcctcgggagggtctgcaccatccaaagaaatcaattgttctgcacagtggtaaggatccagtgttcccagcacttccaaacatttgaatgaagccagaattccagataattatgtgaaatccccaattactaaatattggcaacaaattcatatttctttcaaataatctgtgaaccaagcaaaatacatctgtgggtagattgggatcccagatatgcactgtgtgaccgaccctagtaaaagccctccctccaaggaccctggacactcacacaaaccatttaattcctctccttcctcccaagccaagcatcacagcattcaacaggtaggactagcaagctcaggccaaggtcacagtgtcctgagcagggtgggctaggggaccttttgcacgatgttttcctttgggctgtgggaccacgtcatctggccagagagcaaaggctttcctagtagaagttaccctctgagcttgtgacatcgagggccctgcctctgggcagatcccccaagcatccgtgcagggctgcctgagaagctggaccagctctgacacagccagtgggatgttccacagcctcccagggcagaagggcttgtgggagattcgcttaaacgtgaccgatttcctctcgctggttatctgtggaaggtggaagaattaccccctggtcattagggaatcaccctttcacagcagcagagcgtgtgtgacctggatgatttaaattttagtttttgtcagcatgtgctttcatcagattgttctttttatatatttcatacatattatatatttataaatagatactaaatagacatagatatagatatatttaggtatgtgcatttatttttatattgtatttttttatctcatagttccttgctaatgcatatagactgagtccaatacgatagttaaaatgtcacattcctccaaatggatttccagatattgaaatgtgatcactgaggctcagtgggaatccctttgctctcaaactccccgatgcaatgccttctgatttcaacagaaaagcaagaggctccaggcaccccattcagggactgccaccaaagtacccgcaaatccttcatgaaaggggagacattgacacattctttttttattctctggtaggtatctgtttgcgtgcaaatccgtgagtgcttgcatctcgtgtatttgaaaatcctgtttaagaatgcagaggtccatatagtgtcattaaaacaaatgagtataaccctttggtcatctaggtgaaagcattttgttgggttttttttttttcaaattgctattgctatatataaatgtaacgtatagcaataaccgtagaaagatactgtgcccttgtgtatggataattaaaataggaacatctctggactaaattaaaatgtgtaaaaaccaaatccttatagcatccatgaaattacagaagctacaagtgaatcactagcccagggacgaagcatttctctcattacttcatgaacctcttccatgatcacagttttacattttcacaaatctacatggttctttttatgtcactaaatatctcagctcacttttactgccctccttatagacatgcgagttggtaacagcacgcaaacagtctccaatcatttaagagaaaccaacactttcagtgcttttgatgacacttattactacaaattatgaactaaaaaactgagcaggatataaggagataaattacatctttagaacataaagggggaaaaatgcatatttttcagtaccagaaaatcaaaacccatgggtcctaatctatgaattaagaagacctgaatacctgagaacgtgtacacagatttttgccctaacccatgacctgcttaactgtgtaactcccctcaacagaaagatcctgatttgcccttttctcctctgtactttgaacataagaggtgttattacccataactttttatttaaaggaattgtgcagctgggaaaatgaatgaatttaattatcaatgcagtgtgaaaaaaatcattagagcaagggcctggaacgccacatattaaaaataaacaaaggctattaaaaaacagttccaaaaaggaacgtcagtttttcttcaattcttaaaatgtaaataccaaaaagaaaaccatatgtaaacatctatagttacagaagaaattactctttaagaaaatgttaaatgactgactggatcatttaactttaaatctatactttatgtggcagtataggaaggtcatttgattgccatgcatagaaaaatgagaattctaatgtgttctcaaagtttcaccttcataagacaaaattttcattatgaaattgtatttaatggtgagcacatagaacttcttcctcaattgcatgggatgacacttctgtcagaggcgtgtgaaccagagcaactccatcttgaatgggggctgggtaaaatgatgctgagacccactgggctgcattcccagactgttaaggcattctaagtcacaggatgagataggaggctgacacaagacatgggtcgtaaagaccttgctgataaaaacagattgtagtaaagaagactgctaaaacccaccaaaaccaagatggccatgacagtgacctctggtcatcctgactgctactctcccaccagcgccatgacagtttacaaatgccgtggtaatgtcaggaagttaccctctatggtctaaaaagggaatatatgaataatccacacgttgtttagcatatcatcaagaaataaccataaaaatgggcaaccagcagtgcttggggatgctctgtctatggagtagcaattcttttattcctttactttcttaataaacttgctttcactttactcgacggactggccccgaattctttcttgcgcgagatccaagaaccctctcttggagtctggatggggaccccttttctgtaacatctttccggcgaccgcagaagggactacagtgaggaaatccccaacccaaaggttaactttgggtaagtgttaggatcctgtaacacttccataaccaaaggaagcttgtctttacctttctaaaagacagtggaattatatcttttaactaaatttttaaaaacaactctagattaatattccctccatgactggagagtaaaagcactgatttagctgagtattagggaaaaatactaagcacaggtgcccaggaaagtccttcctagtggacgaagactatggagaaacatgtgttctaggcatacaggaatgctgaactgcttatttgtggttctgaattttctgcttgggaccaaatttgacctgtagctgcagacttcccatggggtatttacagctgggccacttacaaattggaatccaggggagtccaggaaagatgaatggcagctcagttatttccagctgaaagtgaatggggcatctgaaattgaatggggccctggatcctgtaaacatatgagatcttagcctctgatagccaagtttggaaaatcaatgaaagcaatagactttctcctctgcccaatgcacacacaaaataataataataataataatgcaatgttgcttacactttcaagaggtttatggaccacctcaaagctcatgcatgcacccattcccccagccccaagagaagagacaggatgacagatccaaccggaacagagtgtggccccatggtggtctatctccagctaaacagagcaggagcaaatcccacaggagcaaactaagggaagacaaaataattccacctgggaggagaagagcagggggtcttttcttccatcagctcaaggaagactactttctgaccatagccacaagagttagacactgaagagagaaagagcatgtgggagatgcccagtgccgcagaaacgagacgctttctggacagtgagtccagtctccaccaagagggaggagagcccaggagctgccacatgtcctcagctatagcctctccctctggtgtaccagagcctcatgttggtgctggaaaagagaggtgcaggctgaaacccacatcaaacaattgtcactaaccaatatcacgcagttgtttttactttcaccaaaagctttggtgtatgtgtggttcctgatttacttatttccacgtctctcctctcccctgggtttcccagtgcctctctggaaggtcagtttctaagacagagtccagctggttcttcccagcctctctgggactgaatccctgcctggatctgccttcagggatcgccatcagaatggcacacagcacttgccagtcccctctctgagccttagtggccccatctctaaaaccagaacattgaacaaaagcatctgaaggtgaatggggccctggctcctgtaaatatatgagagcttagcctctgatggccaagagccttttggaaattcaatgaaagtgatggactttctcctcaccacaaaaagataataatgcaatgttgcttacaatgtcaattacatgggccacgccaaagctcatgcatgcgctccaagctaagagcccctgacctggctcaaaacgaccatcctcaccaccataagtttcaatatgagggaaactgagccccagagaagaggatagagtgtcccaaagccacacagaaggaaaatgaccaaactggaaagataacccatttcctacctcccaggcaacatccttttcctgggctcttctgccctctgcactccttcattctcatcaatgcctttctgattaccccaggtgttgccacctttttggctccccaggtaggaatttgatatctgggccccacaggtcacccccactccagagttcacctcccagcaatggcagggacttggggaaggaatgatgaaggtgaaacatgggagccagaagggggactatggccaaaataccacagccatcaggtaagcactggatgaccctggctgagaaaggggacaatggagacagaaaggagccacctgtcccttccacgcagaataggtggccctaagctgttgtttcaaaaagcacatttgctgtcttcaaaaaaatatatatgtggaggaggaggaggaggaagaggaaaaaaaaaagatgctcaggctagataaattcagaatgatttgaatacattactgtagttaagtttagtacataaagtactgaggatggctctgccgtgcatttcaatgaagcccaaaataatgaggcactagctgggctgttgcggcttcgtcagagcgattctgccctaataagtgggaaggaggtggctacggctccctgcctatgaattgtcctcatgggatttggcccggcctctgaggggaaggcaaatggaagatgagagaagctgggcagttgggatgagagactgaacacctggagagaagggtgagcccacgtggagcatttccaggcttgaaccagccaaggagtccttcaaggcaaaacaaaatctgtccccttagaccttccaggtcttcccaagggaggctgtggggggacgtggagtccaaataccagaagggcagcctccaacctgcttctcacagctctcttgtctccacctcctcagaccctacactcccaccagagaaaatggaaagacgtaacttagaaacctagaggcccagagagcaccagtgattccctccatgatccatcacagggaggaggttaaggagaggaggaagggaagagtgagaagagaaggaaatgagggagggagaaagagcaagggaagagatgaaggaagaaagagacaaaacaaagtcccccatctgtagctgcctcagcccctgaatggagagagatgctatatgtggctttctccagcatttccggggcctgaaatggctaatctgtaagagctagaggaggagagactgactccataaccactacatgagtcatgtgttccaaacagcctaggagccaacatccaggttgtggggacagacgaatgcagctgtggctcagaaaaagaacactagaaaacatgatggccctctgggaggaccctttgtagagcctggtctttgactccataatcaggcatttgacactcagacgctggagcagaaagagccatgaaggcagcagacctgatccctaggcagtgacaaaagagggtttcctttcccatcagtctccagccagagaagctgggagttctctcaggtgagcccagcagatgttacgagcttgcaaataaagggtgaaagtgactagcctccgtctaaagggaaacccaagcctatggccagcctctcactgagaaaatataaatagttaaatccgtaaaatcagcctccttttctgttctctggatataacttgctcctggacgtctgtgagtagttagctgaaaagctgttggggtggacatctgttgtttttgcctgcccagccgcttttctccttttactggaaatagcatcccgattttccttgaggaatcactcctcccccatgctcgatccatgtggtcttgggtggcgctgaacccacccccagctccagggacaggcaagtgacccagaccaggacaatgagggcatcatatcccacgggccaccatgattggctcacgggttgggataggaactaatatggaacagcctgactcaataacaggtctttgtgtaaaaagagaatcttttcactgaagttccagagaagatagatgaatgtctggtgctgctgacagccatcttgccaccacaaagaaagactccaagctgcttgaaaatggagttaaggcagagaacaccagagcagaagcctgctgacagcattcttgcccctggatccagctatacctgaagatctaccccctgggatttttagttacaggagccaagttcatctgtggtttgacaagcccatctgacgtgggcttcttgcaaaagccttaactaagataaactcacctatagagtctttttttttttttgagacctttggagcctctataactgagtctattttagtcaaggcttatggaatctaccataagttcacagatggactgataaacatataaggtgtctttgtccatttgtgctgctgtaatgatacctgagactgggtaattcataaaaaacagaaatttattttctcaccattctggaggttggaaagtccaagttcaagtgccagcaggttcagttttctggtgaagatgctgtctgtctccaagatggtgccttgctgctgcatcctctggagggaggaaccatgtcctcatgtggcagaaggtagaagggtgagccagttgaacactgcataaagcctttttcataaaggccttaatcgtactcacaagaaaggagtagctgggctcagtggctcatgcctgtaatctcagcactttcagagtccaaggagggaggatcgcttgagcccaggagtttgagaccagcctgagcaatatagcaagaccccatctctacaaagaattcaaaaattagcctgttatagtgataggcacctgtagtcccagctacttcggaggctggggtaggaggatcacttgagcctaggagtttgaggctacagtgagctatgatcacaccattgcactccagccagggcaacagagaaagactctgtttctggaaacaaaagagagagagagagttgccctcatggcctaatcacctcttaaatgctccacctgttagtaatatcacattggccaaaacacctgaattttacaggagacacattcaaaccatagcataatggatcctctgaagtcacagggctgatgggaggcagaagagcctcctctcccggtaccatgatgcctagcaggttcccggggtctccaaaaaaaggtatgcactggcccagttgcacttcgggctgcacagtgagtgaaggactccttccccaggaatatatcaagctgtgaagtattcacagtttttaaattactcatcaagagctggatttttttttctcctctgctaccttagttactgattatttccagacccatcagatacacaaactcttgtttttaaaatgcaatcagcacacccacgcacccatctatagatagtaaagaataggtgctgaagtccctggaatgtattgctatcatgcaagatgaaatggacagcattacaaatgtacactcagcaggaaaatacgatttacctggtaattcaagctggggatggataatcagttcatttcaaataatgaaccaagaaagcactgccatttggaaaacttgggggtccatgcttgtctgtgggatcttggtgtggctgtgtcattcttatgcagaagggtcaccacctcttccagaggacacaggacaccgtctccagtgggtcagatgcagctgatgggagaccacccaggcagactccccaggcaccattttctcatctggctccagtggttttagagcccacagagaggtctgtcatttcttcaaaggctgactctgtggaggggcagatggtgcacagttctgtccctgatctcgggacaggtttaaaagtcccatttgttgatttcctctcttgtcctctgtgcattcagtcccatcactgagctgcttatggctgggagctacaagatctttgtagtgggggatccttcgaatttatcctgacatggctccagaaaatgctcaggtgggttatggacaatgcactcttaagactccggaccagctactagagtgtagaccagggcagcagcaatacaggaaaacatctcaggaaaataaattcacacagaacccattatagctgattttgacctattttgaagaaaattgcaccgtttctaggtgtggagttgatctgttgcaggtggcctacactgtgacctctcttgtaggcatggagatgaacatacttggtatcatccactctcctgcactgctggctcagtcaccagccttttcaggcacggggtctgcaacctctctcatggtttgtgccatctcttgagtcaggagccacagacctcatccaggacttacagcctgacagattaaggagtccgataaatccacacattctgagttgttatgctgggcaaaagccatgcccatccacaagccagactcttggcctccactggaagctttggaactttattcccatcaaacactgacctaatccttgcactgagactgctatttacattaaaattggtcacataatgaaaaaaaaaggtagttcattaatatgctaagaagtgctaatttgaacattgctgaaaagcaattgcaaattccattttgcaacttgcaaatgtgatgcagtgcaaattagggctgatggacccatcttcagacattcaaacttcatctgggtatttctgagttccccaagccttggcggccgagattggttgcaagaccagtgggggtgatttctccttcattggagatgaaagaacgtgcttccagtagtgggtggacaaccatgagcccttctacacagatatcaggtgagtccaaggaagcctgtctcaaggggcttgctgaaatgacccgaaacagaagaataagaatgaccccaaatgcacacaacacatgtcttcagagagcttgagctgtgccagatggacaccctgcacccagtgaagcccccagcccccagcctcaactccatcttccgctgggcggccttcgatgctctgttgacccaagctgggttgagaggtagcctgaggccccctccttcagcaggagaagccagtgggaatcagagccagctttggcaagggtttgccattttcctcccagaggtgctctaggggcagctctctccatggaaaataaagccccagggactgtgccaggctcagttgccccttccatcttcctgctatcctcctcctgtctacaaaggcagtggagttagaacttacatgactgagcttccaaagtcagaagacacccagaaattgatgtgagatgaaaaatacacttgaaagtcccttaggacagtgtagcaccagagaccaacataccttccccttggtaagtggacgctgtcaactttacctccatctttgtctgtcattccttctttcattggattctagatgaagtgggtggcctgcctttggcaccatgctgtttcctttatttttttttaagtgtgtacctttaaacatataacagcccattacacacagcaagatgttccagctctaagagacaccagccacagtccctggtatccattgccaaggtctgccagccacagagccagcacaggcaacagctccccctgggtcttcacaccactctaagctaccttcccagaagtggaagaccagcacttctgctgggatctaactccaaggcagaagtgtctcactcatgaataaatcctcaggtgcaacttccttccttcctttccttccttccttccttccccctttctttccctccttcttttccttccttcactctttccttccttcctcccctccttccttctttcctcctatttttccttccttccttccctcctttctttcttctgcccttctcttccttccttctttccttccttccacccttctcttccttccttccttcatctcctccttccttccttatgtccttccttccttcctcctcttccttcgttccttccctccttccttccttcttccctctctcccttccttcccttcttacttccttttttccttccatcttttcttccttccacccttctcttccttccttcatcccctccttcctaccttctgcccttctctcccttctttccttccttccttctttcttccttccttccttctttccttccttccttccttttcttcctcctcagctacttctcaaaagggcacaaaagggtgaagtaaagagatggaggaacccggctaatgtaaggagaggcaagtccaccctggagccataaacaaggtgcaaacatagtcacatggacatgcagtgcccacggggacactgaaaacgtggccctgagctttccatggagctaaagccaaaaggaaaacaaaacccagtaaggagcaccttgtcagcaaaactgaaaaggcagcgatcctgcttttcctgcagctgaggcctgagagaaatttcttagctgggtcccctccaaggtaatggacaatgtcctcaccatagattctatgaggcagctcgctggcccgagccagagcctgacttagctctccaaaagtgtctgtttgctgggggattttctactcaaaggtgaaagtggaaagcagggaaggcaggcccaaccccaggcatctcccaccacagcctcccagaccccattatgtctcttcagcattgctcatgccactctcgggccacccatagggctttggcacacagacgccttcctaatcacccaggcatcttctcatgtgtcccccgctcagggaggctttctgtgaccactctgtccaaagtagatcatttcagccaggtgaggtggctcacgcctgtaatcccagcactttgggaggccgaggagggcagatcatttgaggtcagttcaagaccatcctgggcaacatggtgaaaccctgtctgtactaaaaatacaaaaattaactgggcgtggtggcccgtgccagtaatcccagctacttgggaggctgaggcatgagaattgcttgaacctgggaagcagaggttacggtgagctgagatcacaccactgcactccagcctggggacagagggagactccgtcccaaaacaaacaaaaaacaaagtggattgttttttcacattgcttattacaatctgaaattacctgtttcttatggttccatatagaacacaaactccacgtgagcaagaactttgtcttgctcaagctgaatcccaagctctaagaattttaccaggcatgtgacagatacttaataaatatttgcagaataaatgaattggcatgacaagtcctatgatagcatattctatatgccacgcacttctaagcactttgaaaatatgcaccttcatgtaacctttagagaagcccttggatataagttccaacaccaacccatttcacagatgaagaaacagaggcacagagaggctcggtaatttactggaataacacagctagtgagtggtaggaccaggaagtctggctacacagtcagagcccacgacctccacggccgatgtttgattggggcaggttgcccaatgcatgatgagcaaagtttgaatctacttccccgcactcagaaatcttccttacccattgctcctttctctctcattgttcctgaacgcattgtctaattttggcgataagcagcctaaaccatttaaattctcctttctttaatgttgttgattttagctaaaatgcaaagtgtagtgcggaggagcccagacggcatccactggagagtctgggattagttcattaataggttcggctactgcccgtgcggcagcataacattaggagctaactgcttctgaccacgcaccacttagaaccccacatttgcaaatcagctcaagacgcatgtcaccatgagagatgacagtgttaaagaaatgcatttttcattgattctattaatattagtaatacctcttattgaatatgattggtgtagacaatgcaaaaagtcgtttttctcatttattttcgaaatcagccagcatgccccaataccagccttgctctgtggacagctgctggctgtgagcattttatggagacggatatgccaggcctggtctggcctcttttagccctgcctgtaccccaacacatgcccaagtccagagcaggaactattggaaccatttacagcccattaagaatgcccaaagctgagcaccgtggctcacgcctgtaatcccagcactttaggaggccgaggcaggcagatggcttgagcccaggagtttgagaccagcctgggcaacatgtcaaaaccccatccctacaaaaaatacaaaaacattagctggacatgcacacctgtagtcccagcttacccaggaggctgaggcagaaggctcacctgagccagggaggtcgaggctacagtgaatcatgattgtgccattgtacccaactctgggcaacacggggaaaatctgtctccaaaaaaaaaaaaaaaaaatgcctgagaactgaatggagatttctggggaattaggttcctctataccccagggaagcctgcaaaggagccccctgatctctgagacacatgttctggtgtgattgtgttgaatgaagtcccagatgcagtgccactggcacattggcacatggagctcaaaggaaaggaacaggggaatgagtcggacctgtgtgtcttgtgccaggcctgccactctgcacaccggccccagccttacaagtctccctcactgtgcagtcctactctgaacgtttccacgttttttgtttttttttgcctcctagtttctgcttctccaagtccctgccttcacacatcatgacctcctgtggcccatccaccttgtggcaactttgctgcttttagcttcaaattcaaatgtggattgccacgctgagagaaagcaatgcctaggaaaatatcctggaaaaaaaaaaaaacaagaaactacactgctctttcctttactgccccttttcctttctctgccttttgttcaaagaggtatccaggaagtgtgaagtctcccaggatccaaggaggctgaggaaaccagcatagttttccctgagcaaatttcagtttaccaggcttgtaggaagtcagagccaaaaaaagaaatcagcattttggcaaggcccagcctggatgaatctcaaatgagtcatttgagaagaatgtaatgggctgcccattttacctagtggtacaactacctgcccaagaagagagtagaaaatgctactgcgggaaaattgcctaatctgagcttgagttgatgcaagaagcccagtttcatactgatatggttttgctgtgtccccacctaaatctcatcttgaattgcagttcccataatccccacatgtcataggagggacccgctgagaggtagctgaatcataagggcagttacctccatgctgttctcgtgatagtgaattctcatgagatctgatggttttataaggggcttttcccccttttgctcggcatttctccttgctgctgccatgtgaagaaggacatgtttgcttcctcttctgccatgattataagttttataagtttgctgaggcctctccagccatgcagaactgtgagtcaattaaacctcttccctttataaattaaccactctcaggtatgtctttattagcagcatgaaaatggactaatacacctaccattttctttttcactgttaaattacacattgggtttctgggtttatacatcagtctcatgatcttgactaatgtgagtccacacctaagagacagatccactctcagaatcagaatcaaatcttgtttctagatttgtgaggtggagaatcaaactacaagctgtgataaatttaccactaacaaatgtcaacctgcagaggcagccaccacccctccaccccaaccccaccaacaatccccagtaagtcccattcttgagaggagaaggcaggaaagggtacacatgagccacaacctaggacaatgattctcaaccctggctgcacagtggaatcatctggtctcaccacagaatttcttatttaactggtctggggtgccacttgggaattggggttttttgaagctctccagatggctctgctgtgcagtcaaacttgagaaccacagactagagcttggaagcacccagtctgaataaagaccaagagtggctgggcatgatggctcacacctataatcccagcaccttgggaacctgaggcgggagatcccttgagcccaggagttcaagaccagcctgggaaacacagtgagatcccatctcagcaaaaaatttaaaaattagtgaggcaaggtggcatgtgcctgtagtcccagatattcagaaggccaagcacgaggattgcttgagcccgagagttcaaggctgcagtgagctgtgattgtgccatgtctctccagccagggagacagagggagaccccacctctaaaagaataaaatatagtagaatgatttataatcctttcggtatatacccagttatgggattgctgggtcaaatggtatttctggttgtagatccttgaggaatcaccccactgtcttccacaatagttgagctaatttacactcccatcaacagcgtgaaagcattcctgtttctccacaatgagagactgaataaagaaaatgtggcacatatacaccatgaaatgctatgcagctataaaaaagaatgagttaaaattagctgggagtggtggtgggcacctgtaattccagctactcgggaggctgagacagagaactgcttgaacctgagatgggaagtttgcagtgagtggagatcatgccactgcactccagcctgggcgagagagcgagactccatctaaaaaaaaaaaaaaaaaaaatgagttcatggttcatgtcctttgcagggacatgcatgaagctggaaaccatcattctcagcaaactaacataggaccagaaaaccagacattgcacgttctgactcataagtgggagctgaacaatgagaacacgtggacacagggaggggaacaccacacactggagcctgtcaggggttggggggcaaggggagtgagagcattaggacaaatacctaatgcgtgaggggcttaaaacctagatgatgagttgataggtgcagcaaaccaccatggcacttgtatacccatgtaacaaacctgcacattctgcacatgtatcccagaacttaaagtaaaaaaattttttttaaaaagaatgaaataaaataaaatataaaagaccagagggcagagagtaggagcagcccacaggagtgctgagaagaagcctccagagacagaaaaggacttccaccaagggaatgccgctcatccttctccatcactccctcactgagttctgccaggagggcacctcgctgtaagtcaggcctctgtgtcagccgccaagaataactgcttgccctcactgaagttcaaaactgccttcggaagccagttagagcctataattagaattcactgcaactctggcaacacgcagcccatccaccgcccaggactccagcggcatcggctgtagcccggtgatttaaaaccacagtggacagattcgccacacctaatgtgcatcccttggtgggttgccccctctgatgtccactgggaaggaattgaattacggccttagatacaagactgagaagttgcaggaggaagtcgcaattatgcacagaactggatgggcaatttgaggagaaggtgacaagagaagctaaatctgcctcccttttgtccttcaagtctccttccagaaacccgttccagcacccaccctgccagagacgcggtctgcaatgctggaagcaatgtaaggggtggaggggtggggggttgagcttgcatttgaacctctcttataatgccagaatggagacagcataattagtcttcactttcacaagtaataaatacactcaaattaaaaatacatttgtaccactcatattacccctgcatatatcataacatgtaaatacacattctgcttgtcttttgctaatcatttgctttatattttcatgttggtcaacaggataaataaacgtcttcctatgtatctcagtatcattaatattctttaaaatgtgtaggttctcatttaaggctgaatgagcgcttttgcctatggccgtggaaacaattaggaaatttgtgaattacatgactggtttgcttgcatttcccaagctaaatatttaagaaagctttctctcatgaacaaccaaaagtttttggtaagcgcaatcattcagggagaagaactatggaaataataccaaatttggaattggaagcctctggttggagtcccagctcatgcataaaactattctgtgactttggccatcagcacctccctggggtttagcttcctcaccaagctgggaatacccttacctcacctacctccctttttaaatttaactcttattttaggttcaggggtacaagtgcaggtttgttataaaggtaaatgtgtgtcatggggacttattatacagattattttgtcacccagttttttaagcttagtactctttagttatttttcctgatcctctccctcctcccacacttcaccttctgacaggccccagtgtgcattgttcccctctatgtgtccatgtgttctcatcatttagctcccacttataagtgagaacatgcggtatttgggtttctgtgcattagtttgctaaggataatggcctccagctccatccatgcccctgaaaaggatacaatctcgttcttttatatggctgcatagtattccatgctgtatatggaccacattttctttatccagtctaccattgatgggcatttaggttgactccttgtctttgctattggaaatagtgctgtgatgaacatatgcatgcatgtgtctttatggtaaacaatttatattcctttgcatatatacccagtaatgggatggctgggtcgaatggtagtcctgtttttaggtctttgcggaattgccacgctgactcgcacaatggttgaactaatttacactcccaccaacagtgtatatgtgttcccttttctccacagcctctccagcacctgttattttttgactttttagtaatagccatttaccttacctgtctcttactaataggagtattagcagatgcccgactagagagagaccacatgaggcagggaagtgcaggaaagagagcttgtcacggatggggccagtgatggaccagacatcatccaaatggcccagggacgacatagtgttcccagagccccatgagcgggcccaggaacctcagaggaaggcctctgtgacaggagctgaatctctgccagatacctggccccaaagcagagagggagcttgagacagcacacccgccttgttctctgattcccttttgcagcctaccggtgggcaaatctaattggcactggccagcatgggcagcctgcagggccaggctcctggggcagggggagggccagggaaggctggtaaatgggtgatggggggtgggcaacagaggcctctccagagtgaaaatctccatcccacctcaggaatgaaaaacgtgccccttcccttcaagttttcaaggtgccttagaattcagctcccttcagccaaggaagcccccgatgctgagtgagaagggaagcacagctttaatcaaaagaatgttgatgaattaaccccattttcaaaaagttcagtacccaagaaagcaaagtttttcacattagattagaaaagattgttttccattaaaggttctctaagtactctgcccatctgcccagggatctttcccagggaagcacccccatccccccgcctcgcctcctgcaccctgaggtcagaggctggcatgggctggaggagagaatgaccagcaagcaggtgggccaggtaagagagtgtgcatgcccagaggaggtcagtcacctgccaccgcaaccatcctgattctcagcacatacctattggtttagtctctggtagtccagtgtcaatgaagaacaatgacactgatgtggttttgcaacaccacaggcaatcaaggcatccccaaatgctcatttcaccctgcatgtcctcaggagatgccccagtcatgtcctgaagtttcattttaggagaacatcctgttctggtacctgggtggacctcaagggttaatccaatccaagcctctgtttgatagataaataagctgagacctaaagaaaggatgtggcttgcttaagaccacacagcaagcaaatggaagagctcaggcttcccagctcctaggccagggctccttacttatcccctaactccccagctgagcaacttccatgagaaaatgcatggggatgcggtctttgtcatgatttagggaagcagggaatgcaggctctaaaattagactgcctgcgttcaaactcctgctccactagctctatgagtttggacacaatatgtaacctttttaagcctcagtctctgcatctgtaaaatggatacaaaaaaaaaagaatcttatcttatctcagggagtcattaaaagaatgagataggtcaggtgcagtggctcatgcctgtattttcagcattttgggaggccgaggcaggtggatcacctgaggtcaggagttcaagaccagcctggccaacatgatgaaacgccgtctctactaaaaatacaaaaattagccaggcatggtagcacacgcttgtattccagctactggggaggctgaggcaggagaatcatttaagcctgggagcaggaggttgcagtgagcccagatcaagccactgcactccagcctgggtgacagagtgagactccatctcaaaaaacaaaacaaaacaaaaagaatgagacagagcatgtaaagtactaggtacagagtaagcaataaaaaaatgtctgctgttgccagttcaccagaagatcactattaacgataatagctctatgttctgcattttgtcagccagacctagcacctgttccttgctggaacttgggatcctactggactagagaactctgaatcagctgagagcaaagctccttccatcatttcatggggagtcaaagcacttgtcaaagcacatccatctccacggaatgaggagacccatgcccacctgcagaggcagggcagagagagaagcatgaagcatgaatgggctgccccagctactttgcctggactttgacaaagctgggaatctggtatgtccacatgctaccagcctcccaggggggcagaaatggggtcatgctcactttaaataccaaactgtaatgactcgagccccaccatcttgattctggaactcagctctctcctactctcctgccctctgcaaagcacccactcagccgccaccatgttcttcccctgtcttctggctcccttggcccttgtctgtttccatggaaaccacctagcaaatccctggaccaaggagctgtctctaagcctccagggggcaccccgaacaggacctctgattgtgctataggacgggagaccaggtctggcagctctctgtcacgagacccttcttgcttctccttacccttcaacagctctcatccccatccctccttcctcacaccaccaatggcccccttcaagttctctgttatccagctgcacttttgggtccattcctgcacagggcaatcaaacagggcccggctgcctggaatcgatgagtctttatggagtcaggcatcccgacatccactgaggccagagcgagggagcccccatgagctggaggactaggaatgaaaaaaatgaagaaaaataataaaattgctattgcttctggatgaaatatcctgatagtcagatgaaaggagagcttgaaatcataatcataatcatctttggtctttgcctgtgtagacctggcctaaggctttaatgtaaacccatggtgattctgaaagctacatgaatagttcatttcccagcaaaactgccatacagggagacaaataatttaagtagggacaatgcttcaccagtatgcacatattagaagtttaaaatcacaacccagggaaagccagagagagaaagaaggaaaaacaaacttttttgtctcaatttctgctagctggaaagatcgttccattctgaagctgtcgtggtctccctggcagagcctcttttccctctgagagaaggagctgggagggggtgcctgcacacagatgaaacatagagacgggagacccttcttggaggagcaggggggaaatttagaggcagagatacctggctataaattcacaactggaaatttacagaggatatgtctccactctagaaaagcaaccaaaggcttattgacatgagattcatgtaaatgaggtctaatttctcaccccgggtgcacatcatcactttcctgagacgttggattttctgagtgtttcaccccacattccacccagaatcaatgtatgggttatagattattgatcactgaggacccaggccccagcctcgctttcagtgtcagaatgagagctattgttctccttcccagacatttaaccgtgagtcatcacacattttcagacatagagcaattatttattgtcatgttatgctacccaagcttgtcaggaatttaaactgaagaatatgtgcacgtgccatcctgaggcagtattctagatacatgaggaaagtcagaaaaacgttactggtccaagaacaaactctaaacgtttggcttttgattctctgtctaatatatagcaatttcaatgagactaatatcaccattctgtgaacctgccagcagatagaagttcccacattattgtggtctgtttccgaggacaaataaagtatgctgctctccagtgttctgtagaagcacgccacgctatagacagaagtgtttcaagtcaacacaatatgaaaaaattcaaaataaaatgaaaagtgtctgaaaacaaaccaacataaatatacagcagtcctgttaattatgattatttatgatcataagaactggcatcattactgtggtttcctttccaaaatctcacaaacttgttactatacagcagtttcggagttctataggcttaaaaaggtggcgtgctggaggcaaaagtcatttttggcagggatgacgtacgtcccgaatgtgagggcttgcacccacgcaggcacgtgtgtgctgctggcacacaatagagtcagcttggactttccagggtcccccaacgttaaaccactggcaatgcattacagatgtctctgatgagcaccgccaatctattaaacaaagtgctctcatcgcctccgaggggcctgaagaatgatctagaaatccaccccctggagggaaacagcctatgaaacatcaaagacaacactgaatatttcatcagggataacaggacttttctctttgtagccctccccgcttttccactgccctgcctgccactgtctcccccccgccctccccaatctttttctccactcacttgacaagtagtcacggccacatcactgccgtcccgctgtccttgcacgctgacctctgtactgtgtggtgcccagtggtcatgctgtcctcgtctctcaccaaccacatctgacaggagacgaggcactcgtggcagcggctcctggcacctgagacaccctgggactacacaggtaaaccaggggggtctgtgttgtctccagactaacaacagaaggaaagacatgacatctccaaccaggagcccacgtccgaatattcaaaaggttcatcatgcgggagatgggggcggccctcccggctttccaggatgaggcctgcagaagtcaggagggatgacgagaggaggagggaggcccacacctggtcccggcccaatcaggggagaagaagaatgcgggtgtaacagaccagcgatgtcaactccggggtgagggtgcaggggagtgtcagcccctaccctctccagggacccctcccaggcaggcttcagacccctagacatgtgtagtcacacaggcagctgagagatcggctcttcctcggggacacagtcgccacccagtcctgtggctccttcagtacccaaggagacaacgaaggttgattagtcaaaaaagaaaatagctcctttaaaaatgacatggcggttttgagttgctatattttcttacagctcctttttggtgaatgtcggagtggagaaaaagcatgaagtattttgactgaaataaatgctttcatggaaaacagagagccctagagagtattctaagactggaagaacgtcatactattttaagcaggtgacagtaatgtcactgtctgaggggttagggtattttttttccctagaattacaagaggaaaaaataagtttgctttgaatagagaaagttaagtaaagaaacacacttcccagttgcatggataattcatagactgcagtgacatatttccctgctcttggtctttgacaaaactaaccagtactattaggcagagaatgtttgctagctccaagcagaaaactaaataaagtacaaacatactcttcaaatcactctgatttttccaactttcattacaccacccacatcaacatggctgcaatgcaattgttcaaaaccctatcccagctctccctctgtttatcatggacagagaaggtctggggaaaatccggacagcacactttatctaatgagcttaaagcttcttccaggctactggttattttccttttcttccttgatagtactgaagagtcaatagaagggtagatggcattgcatgttaccttctagtactaccagcattaatggagatccttcctgtttcagtacacagcactgaaatacacacacacacacacaaaagagtcttgcaggccaggcgcagtggctcacatccgtaatctcagcactttgggaggccaagtcgggcagatcacttgaagtcagcagtttgagaccagcctggccaacatgatgaaaccccgtctctactaaaaatgcaaaacattagctgggcatggtggtgcatgcctataatcccagcttctcgggaggctgaggcatgagaatcgcttgaacctgggaggcagaggttgcaatgagccgagattgtggcactgcactccagcctgggtgacagagtaagactgtcagaaatcttgttagaagacttcactaggaccacatccatttactgcccacctcttcaccccaggttgctggctgccatttggcagctgtttaagagtggctcttgggagggtaggagcagtcctgtggcagctgtgttcttgggttccatggtgaggccatcatgaagccatggtgaggctccttctgggccaggagctggaacggatgaagaccccagctcaataggtcccatggtggagtccccgcccccactgtcaccacctctcaccttcccacgtgcaggtacaccatctatcatgaagagaaaatgtgctttccactcccagctcagcaacagcacctggggccaggaggaagaagagagagaacagggaggtgacttcgctggggccctggtgcctctgagctcaggagaatacccagaagataatatggacatgtgaagagtggttcaagagcacacctctgccagctgaactgctgctgctgctgtacagttcttggggccagaccaaccttgaatgcctttgaggacaaagccatccctccctagatgagacccaataatcagtctccttggaaacatctagctccctggcaactacacccactcaagctggcccagcccctcttgggggatggaagagtgcctcagatggatttgtatcaagaggctgtgctctgaatccccttatggggtcttgctaagctggaatcccacatgaagtcacaccgtcacggggccttctccactggggcctccaccacactgacgccactcaaggtcagggactctccaactacaaaagtaagattttcttctgaagaaacctcacatcccaataagctcagaaggaataagataactgctttcataaccacgcagtgtcttcttttattattttttaaagggacaaagtctcactctgtcacccagactggagtgcagtggtgcaatcgtagctcactgcagcctccaactcctgggctcaaaggatcttcctgcctcagcttcccaagtagccaggactacaagcacaggccaccacacccagctaattcttttaattttttattttttttaagatgaaaggagagacccaatcttgctatgctgcccaggctagtcttgaacccctgacctcaagcaatcctcctgtctcagcctcccaagtctctgggattacaggtatgagccatcatggctggcatcttgtgtctgtaaagcgaggccccaaaatagtgcaccaggatggcatgggacttcagagcactatgtcaccctgatgctacagacccctgcttcccaccagcacagcagtggcagtgtggcctgccacatacacaggtcatcagcccagagagagggcactcctcagagctgaaatccagagaagggtggctgtgctgcgtaccctgggtcctcatggggctctaggaaggcggaactgaggccagcagcatttactccagagcagagaggagtttcagaattcacatgaaataaaacaaaaatctaaacccaagctgagatttcattacagaatcccactctagggctgcaggagcccccatccccactttcactccactcccttggctgtccagatgtccaggttgggtcgccagaaaggccagttgccccaaggccccagagaatgttctgctgctaggccagagcaccatccccaggactactctccatgcatggccagctgcctagttgggtttcaccttggttatttggtgaatatctatttggagcatgttcttatctcagcagacacttccaataagaagactgagccaccaggcagatgttataagcaatgtgagcttgtgctggaagaagagagaatccaccagtgtcctgggccctccaaggcctctctgagggaaagacatttggacagagatgccaaggacaaggaagaggcagtcacccacctctgggcaaggtgcaaaagcccaagattcacgttcatgtgttgcaagcacaaaaagaagatcctgtggctggagtagagtgaggaacagtgagaatggtaggagcagagggcagagaaagtggcaaaaacaaggtcgcatgaggccttgtaagccatggtcaagaggtgatattttattttaaatgaatccaaagtaattgcaagtttttgagcaagtaagcaaaatgctcctttgcaaaaaacaaaaaaaaaaaaaaaaaaaaaacaaacaaacaaacaaaaaaaaaaactctagggcttcagtaaggcaaacaaattgtgagtgggaaagagtggatgcaggacttttaggcaagggtggggtcagggaagatggagaagagaagacataagatgtttggaggtggagccaacaagatgcattattgactaggttgcaggtacctggcaggagacaggggctttctcgaccactcatgcaagagaagagtccaggatgctgcttcagtcacctgtctgtccacaatgacaatggggcatgaaaaaatgccctaactcagggcataataaaataattagcttttatttagtacacaagtctgaactttgcattttaggctgggctcggctgggcagttgttctggttttgaaagggctcattcacatgctggtggtgggttggctgttagctgggataagaggtaaatgggccatttggctcccaccctccatgtgaggctggcccaggcacatcctcatggtgaaggccaaggtggaaaactggaccagcccaagcacaaagcatttttcatgcctcttctcctgcttatttgttatcgcccctttggccagagcaagtcacaggacagatctcagcatcaaagtggatggcccttataaagatagatggccaggggtgaggacttagaccactcatgcaatctgtctacccaccacacaaggtcctagatgtttgacttgaataacagggtagctgaaggtgccttttattgccatggggcaaactgggagaggaatgcattgtagatggcaggaatcagggattctattttggcttagggacctgccgggcagctttatgctccctaagcactgagtgagggctcatgggaactgctccatgcctatgggtaattctgctcttctggttttgaataaaattcactaacctggagtttcaaagtcccaagaaggcaaaccttctgatgatgatgccagtgagcctgcattcaggtgacaacatggcaaagagcggttcctccccagtcccaaagtgacacccgtcagctgaacagtgacggacatttgtcacttgccaaacagattccttctgtctgtcatgtccccatcctgtctccactgcagaaggagctggagcctccttttactgagaggctctccaatcttatgctgatcgttaactaagatatttctctccagagatttattacattaatgagctctgaaattactcatagcaattaagtatattgtttttaaactcttcagaaatcatcaaaacacattggttgtttttcagggaaacataaataaagggtacaacttgtcacccaataaatcctgcagcctgctctcttcatgttggtttggggagtttctggcccctagtctccaaggtgtgccttcacaactgaaaggtgttccactagtgaaacttgtcctttttctttctttcgtctttcttttcttcctttttctttctttcttttgttctctctctctctctgtttctctctctgtttctctctctctctctctctcaactttccttctttctttcatgttattgttttactttttagagacagggtttcagcttggcatggtgactcagacctataatcccagcattttgggagacaaaggcacaaggattgcttgagctcaggagtttgagaccagacagagcaacatgacaaaaccttgtctctacaaaaaacatgcaaattagccaggcgtggtagtgtacctgtagtcctagctactggagaggctgagatgggaggatcacttgggcccagtaggcagaggctgcagtgagctgagatcatgccactgcactccagcctgggcaacagagtgagaccctgtctcaaaaaaaaaaaaaaaagagagagagagagagagaggcacagaactcaggtccttctagatattaataaaaaggaacttcttacaatctgtttcatttagttttcacaactagaagggcaaactcttattattccccatcttacgaataaggaaactgagacacacagagggtaagtgatttgcttaagttactgtaggcttggagttttgtacctctccagattctctctccatgcagggaggctgcccccaaatggactacattatgggctctgggtcagtttcagccaatgagagctgctgtatcagatcagaaggtaggaggagagggaatgggggtatttgttctcccagctgcctcctggaagggatgctacttgctgttgcttctttccattaatccttctctgtcttcaggctccaaactactctttcccaacatccatgtctcggcctctccctacccaaaccctaccctgtggactcctaaactccacttgctcctttgtcaatggctctttcactgtttcattaaagccttttttttttttttttttttttttttgagacagagtctcaactccgtcgcccggctggaatgcagtagtgcgatctcagcttactgcaacctctacctcccaggttcaagtgattctcatgcctcagcctcccgagcagctgggattacaggcacatgacactatgccccactaatttttgtatttttagtagagacgggtttcaccatgttggccagtctgctctggaactcctgacctcaagtgatccacccacctcagcctcccaaagtgctgggattacaggcgtgagccaccacgcccagcccattaagccctctttgatttgcatactttgagctttgaacatgccatctgcttgtttctaggccccaaactcccaaatctatactctaaccactaccccacattccctgtgtcctgcaccccagaaaacaagaagcttgacagacggcagggtaagaaaattactggtacatttttctttcactcttgaagctaaaaaaaagacttgagagcttcttacattctgagccctttggcaggactttgttcaccttggtgggtgatgggaaggacagaggagccccatcaggaacaccagcatggaccctggtggcccaccaacaccagcacaccagcacagccctagttatttaaatacatgagaggacaatcacagaatcttcgctaggctctgccgtgggctgtgcagtacagaaagagtgctgacagtgtgtacagaggagaaaggagagacccaaagtcccagggctggagaaaaactcaccagccagcccttcctggaaccccatgtgcaaggaaactagcttacttttcagcaggagcctttgagtctcaaattcaagtgagttagccctggtcactgcaaccccagcactgccagagggaactcggcttggagggagggatgcctcttccactctccagcacactgcaaacccccattcacagcacaggatgaaggcctcactccggagctcagggagatggcagtgtcctgaatgagatcacaggacaggacaaagagaaagaatgtgggtccagctccctttcccattgggaagtgtctttgcttcccaactagaatctgtaggctgcctggagctcccctccccatcactccctggcaccagccatgctcacttcatggggatacgaaatgtctcagtggtgtgcaccttagtttctagcaccgttaaggacccagatcaaatcccttttcctccatgaagctaggctatgggaggcctctctgagctccatttggacttgctaaggtgtctcatgctgcctcaaccaccccacaggagcccttttaggcagggggctgagccttcatagctctcacatctccccatctcacatggacacataggccacactccagaaacactagctgttggttccaaaaggcagccaaaacagagaaaattgcagattcctggggctgaaaaggacctcagagaccatctggaccattctacaggtgggaaaactgatacccagaaggagaaactagacaaaaaacctagatgcaaagctagaggctcctaatcccaatccagggttcctgagctattgcaagcccatcccagccttcttgcatctacttgcatttctcattgccccgtttggacccccagaagtagccaacccaaagagcatcaatatcagagcctctcagagtgtgaggaaggcactctgtaagtattagatgcacagtggcccagggattttttttaagtttagcaataatcaatgtttgctgccaccaccatttcctcaaggattgtaacccagagccctttgcaagtccggggctgtgtgccatttgacctcattggtaggatggtaactataaaaggcagttgtgtttaaaatgtgtccattaaaaattaaaaccttctaggagcttaatgccaaatgtgcagattccacctccttccactccctgccaagcattccatgccaataaagtgtaatggttttaatatccttcaaaattaacataggataaggcaaccacattaaaacagcaatgaacaaatccctcccccatccccccaaaataaagaaactaacaaaaggggatgattgaggcttggtggggtgagtcctgagggcagaaattctggttactacaggaggtctctgaatccagacttgggaagagctgttggggtatctcttgccagggagagaagactgtgagaatgagatcttcatttgcaaggtattgcaaaagctggggtgacttgctagtgcccattcagaaagcacccactaaaaccccagcacaaatcaattcatcctgaactgagctcctgcaaagagacattaaaatttgtctgtgcataataatgggaacagtagagactataagaacagggagggagtggggaaggactgaaaaactacctatccagtatcatgctcactaccctggttacaggtcaatcgtaccccaaaccttagttaacatcatgcaatatacccacatcacacacctgcaccagtactccctgaacctaaaataaaagtaatgaaactattctaaaattgattttggtgatagttgcaaaattgtatgaatataataaaaccattgagttgtacaccttgaaaaaaacagaaatttagaagttaataagtaaataaacaaaaacttaaaaaaaaaattgtctatgaatagcatccagcacagcagggccaggaagaggagctatcaaggaaaagggggccccacccatcctcaggctcagctccagcccccacccagcccccctgcagccgcagaacccaagattctgaacctcatcatccccccgccaccagctccagccccatcatacctcccacctccaagcaggtgtatcttcattgaagtgatcccttgaaggaaccaaacagctaaactcaagcaagaccaaggatcaaagtggggaccgctcagacccatatgaacagaactggccacagtgacgtgtccaagaaagcccttgtctaagaggagctaacaatggcgccacagagaggccacggccaggctctcgggcaccatgatactacagaaataaagctaaattataccacttgtcatcattaagaaaaattttcatcttctttcttcatttgaaaagcactatatttaatgaatgcgtactgagtcatgacacgcaaacgactaaaatacaggaattatactggggtcaactaacgtattttaaaaccttgaaattaagggacttattcatgcctgtcaccagtgtgactcccagtcattagggtcctctgcatggctgcctgtgagcaatggggaatggcggatatttctgcaaggggtagcccaagcttccttgcaaattccatcatggtcaagatgaagaaatcttgttcacctgtttgcccaccttctgtgggcctgtgctctctttgggtgtgtatccaatgaaggcattactggtcttgtgcaaggtaagccccattccaaaggcatattttgcagattcatcactaatgaaaggtggagctttgacacctcctgtgcttccacaatgggggcccataccaggtgtgcatcagaagagtggctctttctcaactgcattcatctttaatttctccaggaaaattaagatgtctcaaagtctgaactctgcaaaagtttgcatgaaaaatggcaaagaaaaaaaaaagatggcaagatcaaccaggaaacctgaaatgaggaagtttgaactatcttccaaggtcttgacacctttaggttgaagtgggcatatttttgtttttccaccctccaactatcagctcttttcttggtaaagcagtattctgaatttcctttggtgaagccacagcttccattctcaagcatgaagtttgagtagggttgacctcacatacagcaccaaggttggatgccgttgtaagccaatcagtttatgcctttatccgaccacaggaattcgtggcccaattctggtcaagttattgatgattgcatatagatacaaagatttcatctgccagaaacacatatattcatgaaaggagtgcttagagctattggaaggggaaggtgatattgtgtggaagctgatgatgatgccaataccaagagggcccttgggcacaccttttattctgctggatcaaacctcacctgaagcagaactttgttgtttacaaaggccaagataattttctctcttttttaatccaatgagagttgggtgggttttatggcatgcagtgcttccagaatgtgaaaggccctgtccagaatcctatgatctagagcatacagaagcttttcaattgccttgcctccaataaacacaaagattactggactcaaagtaagtttcagtaaagagagtcagtaaacagtaaagagaggcagccgtatcagtagcaagacacatggagctcccagcttcctgagagctgggggtcaggtcacataaaacctcattgtttatggctgacctcttttcttatttatcaaatcccaaaccatcctagtcttttatacttggaaactacccctgccttgaactgtccaagcctgtcactgattaacttctctctgctaactaggctcactagtatctctgggattctgatggggacatacaagcaagaaaaatgaccaaaattccccccacccaagttgtccataaaacatgacatttgatcacatactttgaggccgctgcagtgttaaaagatgaagcttagagaatgggaaaagagaaagctatgatagaggagtctaatatcttcaactgtggcaagaaagagaggttgaggaagacttcacggttgtttctgtcttcccagcattcagatgaggatacaaacatgaaatttcaagctctaccaaggtggaaaacgtcttaaatgtcatctactctgacccttaatttaatgtttcatttcctgtcccaacctctcctacaaatgtccacatagcctgtgttgaatacttctgataatggggaactcactccctacctccctcagagacaataccttttttgattagtgttgaaagtctcaagttttcccttgttctgagcaaatatccatatctctgaagctcccacccattagggatgtccagaactcactgttctctcttcatctggaagctctcaaatatagaaagccagaaatcacggtcccctaggtgttcctatgtctggattgaatattctctattcatttttcacattgccttggttcagcatgtctaaccctgtcccaggctgtactgatcacaatactatctagtgtggactggtcagcatggcaagatagagatccttctcatcacctccatgttctttacactatactcccattaatacagccacagttacactgtgattagacagaccagtagggatttagaccagtggaatttctcctccttatttttcaacagaggtaagatatgctctgcttataagaaatccaccttaaaattgtaatcgatgctcccacattttgggctggtgagaaagcacattgcctggtggtgagttaagaacatgccagtctccatgcagtgggagggggaaaagaagtgttttcagcttcaaagatgaatgtgtaagtaaaagtgaagtctaccaaattgaaactgatcaatgtaggccacccatcgctaattgtcacccagctattttgcttccacgagtcacgtggtgggtgacagccagagacattgatggattctgacctagactagaaatctggtttctaaagaagaaagaaaggaaagagagaaagatgcaatgaaattaacggcccagcatgaagagaagggagtggggaaaaggcggtgtctttgacagctcaagctgaggaggaaaattagaaaagaaagccgactccaccgccatatgtgttagagctggccgggacagctggaagaaatatcgcccagcccgaatccctggccaggattgtgatccatgtctgcatacggctatcaataaccctgcatgattaatgctaatgatttatgttaattttgccataagctttatttgtgcccggtgttgaacttatggatgtcaaatcattccttaggaggttgctagagatttttaaaagcaaagtctaaaatataacatctgacattccatatatcacagccccagcctccccaacattctttgtgagatgagggtcaccatcccccatgtaattgcctctcagtcagcaagaagtctttgggaaaggctccacgttacaggaaggatagctccacagggacctgcaggttcctctattttggggggttggtgttgcaaagtccatccctgacaccccacctgtctccatgggctaccatttatccaggaggtaggggagtgcacagtgagctccttgagtttcatcttaggtggctgtgaaccagtcacttcacttagagagcccacgttcccttctgttccataatgtggtgggtgggggggtatgctcagcccacttgcaggaaacctgggaggctcagactctgtaacaccatgggatgctttgtgctctgtaatgccccccatacccaatgcactgcattctccaagactgctttgagggtctggttgcatctccagaaccaaggcataggggctgggggtccagaggagatctgaagatctggcctttcaggtcatcacctgcccaccttgagtctgtccaaacatcagtcacttatccagatgacccccctttgatacctcctctattcactcccaaaagccagtcaacacccttctatgagtctggccctctgcaagattctggacactatggtgtgcaagaaaggtggggccaggcagcaacttcaacctctcagatatgctgaaacttaagcctcaaggacaaacccagttacagagcctagtacccgatggtggtgcagcagagtgcttcaggtgtctaccctgcagaggacaaaaggaggccaggtcagacagatacagtagaaatggaaagagggtgtcactatctagcccagtgcagcggcactggatgggacagccatccaacattaatgcagctcacttgggggttcaagctgaatgcaagtcaggggacctaggggcaccaacgtagcacctctgctctgtctgtccctcactcttctcatgaaatcctgtccaagactgccactgtcctctgcaaccacaggattcccccagcctcccccttggctccagtaatcaggattccttcaaaagcccactgaagacccagggaccggtagcttttccacctgtaaaccactcaccctgtcagcagcttccctgccttcaaaatgaaaccaagatccaagccaggacccaaataaaaacccaagccatgggggaggtaaatctcctcctcctcttctttttccccacatctcttgctagaaagtcattatctatagcttaaaagaaacaatttctctatgggtttgtaccaaaaaggaaatattctatctgctttcttggcttcctctgatggggcttcacgaaaccagtttggtctgggctgtacggtgaacacctgtcaaaacgtatggaccatgccatttatcaaataatctgctccaagaacagataggcactatcagcaatctggtattgatctgtacaggcccctgctattgttcatccctgcatcccgaatggcagcaggaattaatgaaagaaacaaaacaatgcataccaatcactcagccgcacaactttgtttgctgctctcattaagttgggcaaagtttccccagctaacccaaaagcttgcttgggaggggtgggcccagaaggccaatcctctgattcaccaacagcccctctggctgtcccagttcctcttcctgacctccatggagcccttgtcagatgcccctgcacctttgacacctatggaagtggaggtgctagtggcaggcaaagaccccacctgggtctctacccgggtccaagcagagatagcctttcttctgacagcccctttgtggttgtgtttaagccacccttgtgcagggccctcctccacatacagtcttgcaccgggaagagatctgtccacaaacaacacctaaaagcccccagggagtgtctaggcatcggggagaaagagtgagtcaaaccaagccttccccctaaaggcaggtcctgcagagagatacatacgaatgcccagctgtgggcctccactaaacagtgagcccttccaacacacacacagtcactcctgcctcaccatcactgtccatacctgagcaggcttcaaggctcagcttaaatagcacctcctgaacccttctccaatccctccagccaaaattggtatctcccccatctgagcactcaccatgctttacctggcctataaaaagtagtactgtttatatctcctccatctataagacttatgagtagaggtccaggtaaaacaagcaaaaagaaacctctgaagtcaaggacatagttgcagtcatcattgcagccctacatagcatctaacactattaacaatgggtggatggataaatgaatggatgcatggatgacagataaatggatgaatgcatgggtaggtgagtgggtgaataaatggatggatagatgaatggatggatgaatgtatggatagatggatagatgaatggatgaacagatggatggatggatggatgatagataaatggatgaatggatgagtaggtgagtgggtgagtgaatggatggatagatgaatggatggatgaatggatgggtaaatgtgtggatgcgtaggtgggtggatggatggatggatagatggatggatggatggataggtgggtaggtgggtgggtggatgggtagatggatgggtaggtggatgggtggatggatggatggatggatggatggatggatggatggatggatagatgggtgactggatggatggatagataggccaatggatggatgggtggatgggtggatggatggatggatgggtggatggatggatggatggatggatagataggccaatggatggatgggtggatgggtggatggatggatggatgggtgggtggatggatggatggatggatggatgggatggatggatggatggatggatggatggatggatggatgggatggatggatgtggatgggtgggtggatggatggatggatggatggatggatggatgatgaatggatgaatctgaaccacgtgggacaaaaactcaagagtgcaccagttccatagcaatgagctcagagtgatggcatcctgatgatgggcagcactggggatttcacttttcttcccaaagcacaaaagtatctcctcctactttagccatagtgccaaaaaggagacactgaggtccagagaggatgaagaatttgctttggatcatacagagccagcctcaaccacagacatcctgaaaataaagaaacttactcgctgtctggtataatcaagaaccccaccccatcaccccttcaggacaaatatctgaaccccacttccaggaagttttaaggccatggcagaacaaaaccaccaccatagtcctgctaagtcagtgagtgcagctgagctcacaccacacctgagagacctgaagtcctgttctttttggaagcatgacttggagggatgccttggttgtccctgttgggggttcagagggtcctgcgtgtcacccgtactgagagagtgaggcctttcctctttggaggaccctccttgacttggaggaagcctcagcagaaaaattgccaagagtgaagcttttcactcagctcaagttttcaagagcggccactcaccccacattcaggagatgtagcagagagagtggcactgaccgaagtctcactcagctaagtggggcctcaagggggccaagagacacttacattctggaaaggcacagaccaaagggccaggctgggccagccagacatgtgacatgcaattctctgaggacagatggcaaatctccactcatgcagggcccaggtgtggggtcattcccccttgctcccacccagagtctccctacagtatcatctggacactgggtcctccccaagggccacatcacacgtctgcattgccaggacaggagaagcagcagcagcttctgtttccaagtaaagatgacaagtgtggatgaggagggcgggtaggccggtgggcggggaagagaaaggaaggaggagaaagtcagacagtgacagggaaacaaataaagctaaagccttggttcctgcccttaaggatctcagaatacagtggagaaggagaaccattaggtcacagactcaagcaaggacaagaaaccaaaccaaaggtcctgtaaccaaatgcaggttcagtcactcacccacccaccactggcaaagtcaaataataaagacgaggtgtggtggaaggaaagtgactttacttccaaagctagcagtggggaagcagccaggtgcatgcctaaagaaaatgcttcagctttttgggtaaagggtaagaactttaaaaagggattttggtatgtagcacatgcaggagtgactggggatgctagtctatgtgacttgttttgatgactgtcttgagctgttgccccatctggtgaatggactggcaccatctcaggtagaactgggttgcaaattaactgcagccttgaagtaatctccaggaggggagaattccacagtggcttgaattgttttaaggtttagtctccggaacttccaaacaaacacaaaattaaataagggaatcatcatgcaagcagtgcctggcagaagggagaacaaaggctattatctgattattagaggcaagaccaggaatgggcaggaaggagaaagaaaagaaaataacgtttaaaaacaggacacttgctgggcatgtggctcacacctataatcccagcactttgggaggctgaggcaggaggaccgcttgagctcaggagtttgcagccagcctgggcaacatagactccatctctacaaaagaattttaaaaaaaacagccaggcatagtggcacatgtctgtaccccctgctactcgggaggcagaggtgggaagatcgcttgagcctaggagatggaggccacagtgagctatgatcacaccactgaactccaactgagatgacagagcaagacgctgtctcaaaaaaaacaaaagaaaaaaaggtcacagtcccatgcttaggagtgcctcttcttcaggaattctggggatattcagaacgttaggagggattccctaaatccctcctttctaagcttccaaatatctcttgtccagagctcaccagtgggtaggccaggatttggggatagaactgtgttctcttgagttcctgcaggcaagtgccacaatgatcaaaggtggtacccacccccagtccagctgacctcagcaaagtcctgtcttccaaagcgggtcagtcctcacctgctcttctaccacaattcaggtagaaatgcaggttgagtatcccttattcaaaatgcttgggaccagaagcattttggatttgggattttttcagatttgaggatatttgcaaatataggatgaaacaccttggggataaaacccaagcctaaacacagaattaatttacatttcatgtacacatgaaggtaattttatacatttttgttgttgttttgtttttagaacaaggtctggctgttacccaggctggtctcaaactttcggcctcaagtgatctttctgccctagctgcccaaagtgctaggattactggtgtgagccactgcacccagcctacaacatttttaataattttgtgcataaaacaaagttttcttttggtttgtgttttgtttctttttttgagacagagtctcgctctttcacccaggctggagtgcagaggcacgatctcggcttgccacaacctctacctcccaggttcaagtgattctcctgcctcagcctctcgagtagctgggattacaggcatgcaccacaacaccaggctaatttttctatttttagtagagaatgggtttcaccatattggtcaagctagtctcaaactcctgacctcaggtgatctgctcgcctcggcctcccaaagtgctgggattacaggcgtgagcgacagtacccagccatgaaacacagttttgactgtgatctgtcacatgaggtcaggtgtggaattttcctcttgtggcatcatatcggggcacagaaagttttggatttcagagcatttcagatttcgaatttttggattaggtatgctcaacctgttcagcattcctgagcaggcaggactgctgggactcacgaaggtaggaatgaaggatgggttccttttcactgactcctgtcccattatagcaaaatccccaaaaccccgagaatgtgctggagagcaggggttccagaaggcagggagagggcctcacagggccttatccaaggaatcctaccaaattcaagaatgcagaaacggaagagcctctggcgtgagccccaggccactcagcaatgtcactcgctgtcccggttagtgccggaagcaccagggctccggatgtgaaaacccatgctgcacatccactcctgattgcactgggagctgataaagggaagtccaacccacagcaatgctgctcagtgctccggagaaagccattaggccaggtccccatgctgtcgtcagccactgagggttgacacccacatagaacccggagagccaatgggcacagcctggccatgcagccacttacatcacctttggaggcagaggccctgccatgctctgggacatgagcagctcaggacagagcacatggagctcaccactaaggctcatacattcaccaagtgaccgtcactgcccacacatgccccaccctgcccttccagcatccacacgcacctctgggcacacagccagtcccacagaggcctgacaccctgacactctcagcctccatcccagtgcccacaggcccgctcatctaggccaactccaagaaagctgacagagcagcaaaatccaccttcgtggccctggagcggtgacaccaggttcctcccagatggctccagtgagcccaggggccattgcaccggcacgctgcagctgcctctctgtaggaagataccactttagaaataggtcatgtgtgctgcctgcatccccttgaatcaaatgggatggtggcttgatgggttcttctcaggaccctgaacgccaaggtctccatcctgccttcctttccatgaccatatgacatcttcaccttggaaataagctgccagcttgctctgcaggcttgcttgagaagagctgatctcctctctctctctctctctctctctctctctctctctctctatctatctatctatctatctatctaatgctagcaactcatcagtgaacccctccctaggaaagcagccatttcaatcaaatatctgcaggtgcagagcctagggcatgacgctgagcaagatctcagaacatggtgggacggagacccataagatcacagagttgagcaaggacaaaaaaccaaaccacagccccaaacctggcagcatctctttgggaatgtcaagcgagatcccccaaatgcctccattctgagcttccaaatgtctcttgctcagcactcacccaggctctgacatcccctgaagaccccagcaaagcctggatatggaacaccaccatgggtggaaggtttgcagggagctgtgctctgtagagggaggcacaggaaagaacatttaggtaggacttgctcatcctcccaggcggcactgctgtcatgggaatgggggccacttcttggcaattaggatgtttcatgctgctcagccctgaatgctccaacacccataaggacccattcaatgaaggctagatgagggggcacctgaatggtttggatatttgttccctccaaatctcatattgaaaggtgatccccagtgttggaggtggggcctggtgggaggtgtttcggtcatggcggtgtattcttcatgaatccttggtgccctccccatggtaataagtgtgttctcactatgttagctcacccaagagatagttactaaaaggaacttggcacctcttcttctctctttcttggtacctctctcgccatgtaacacccctgctccctgtccgctttcccccatgattggaagtttcctgaggcctcaccagaagccaagccaatgtggttgccatgcttgtacagcctgcagaactgtgagccaaataaacctcttttctttataaattaccctgtctgagctattgctgtatagcaacacaaaatggactaacacagcactcaagcaatttccacccccacatcccctcctctgaagccatgactgaggtcacacagcaaggccaggatgtggaagaggttagccactagaaagtcactgtctctctgtggcctggcttggtttgacatgcacaaattattttttactttaattatcccccatttaaaaatcaggaggctttgctttttagtctgtactaccacttctacataaataatggaggactaggcaattctgggttgcattcctacctggctaggtcagctggggcagggcagcagtaagtggccctctctagcccatgccactgatggcactacctgcctggcccctagaggtatctggtttgcaactctggggtgaagcatgactgcagattgagacatgatatggaagtttccagagggccagtggggtaacagttggccatagtaagccatgcttcctggtgaccctaaaattatgtgagttggagagcttattcccctgtgaaggatgctctcctgcacgtcaccaggtcaccgggaagccaggaaaactttgctgactgggagagcagaattttcagagaggcaaggccaggtttctgggaatccctgggcaatggggccagcatcctggctattctggattttactgcaagtgttcgcagctgatgcctgtttccaggagtcaggcaggcttgctttaaatgcaaagaggggccgtgattgactgcagagatccagtaaacaaagagggttaaaaaaataaagctaggcttcctgtctgccctttgcacactaacagctgctgtttgctcgggcttccacatgagtaacacgggcgccctgatttctattatacagaacattaataagaggaagcactgaccctcgattgctgagaaccaggtaaatgatggggagggaaagcggccgagaaatggtaagcattttacaccgcacgacttgaaggggaatgcgttgactataaagatgacgggtgttgtagcaccgaggaaaaaaacataatttttcattgatgtacggcagccaggctggaaggaacacaaacactacagtagatccattaactggatgacaagaaacagtgttcacatccactcactaaactgtttttgattctttagtaccaacatgcagaatgatccttacattatgttgccagggaaaaaccttaaaatgcatttatttcataatgtaactttcttgtattatcataacagagccacaacagttgttgcaaacactatggggtctaaaaaaacacctaagtacagttattaaaggggaaattttttcaaagggggaaatgttgtgtgtctacaaaagtaaggggaaggagggggatacagctcaccttccacctctccttctggccacgggagttccggaccctgagcaccctcagtcaccgcggggcagggctggggaggacctgggagagggaagtggaagacgtgaaggtattcatgcccagtcactctgtgaaatggaagatttgcagggatggataacagtcactgctgccatctagactctggctattccattcctacccttcacatgcccctgtacttcctcacctactcccggtaccctggactgtatgtcccacctatataatggggacaaaaatggtcatttggggcaaggtgttgtggctcacatctgtaatcccagcactttgggagaccaaggtgggaagatcccttgaggccaggagttcaagaacagcctgggcaacacagcaacattgtctttacaaaaaaaaaaaatatatagctagatgtggtggtggctcatgcctgcagtcccagctactcagaaggctgaggcaggaggatcacttgagtccagcagtttcagaccagcctgggcaacagagtgagaccctgtctctacaaaaagtttaaaaataagtcgggtgtggtggtgcatgcctgcagtcctagctactcaggaggctgaggcaggaggatcccttgagcccaagagtttgaggatgcagtgaactgtgaccgtgccactgcactccagcctgtgtgacagacactgcactccagcctgcattacagacactgcactccagcctgtgtgacagggcaagaccgtaactcttcaaaaagtgtttaaaattagccaggtgttgggttatgcagcctgtagtcctggctactcaggaggataagaactgcctgggatcccttgagcccacaagggtgaagctgcagtgaactatgattgtgccattgcactccagcctaggtgacagagtgagaccctgtctgggaaaatttaaaaaaaaaaaaaaatggccagctgatgtcacatgcctaggcatgtgctcagcagtaaatgaaaggttctaaggggcattcaaatgcactattctgaggggcactgatttctattacatacaacattaataagaggaaattgtaaaaaataaaacattagatgggtatgtacgctattgtagtcccttaaaatgggacattccaatgatgctctcctgggcctcaccaggtcacctcaaagccagtaaaactctgcttcctggcggagtagaatttccagagaggtaaggcccagatctctgggagtccctttgcaatgggaccagcatcctagttccctggtcttaaccaaaagggtgtcctcaggaggcaagagtaagtttccaggaggcaggtaatttgtcttccccactgtggtcaccaagcagacagcccacacccagcgactctaccatagccaggctctgaaggagccagccccagggttggaatcttggctctgctacatcctccgaccccccagaatggtagttctcattagtggtactactatagccaatacactccatttccagcacagagctctggtgtgagtggtgccccccaccaggaaggaccttgcctgctgccactgaaggcagtgaggagagctgtggcagatgcaaaaacaaagtgtgcggcagtagaagagcaagtgaggaaggcttcctggaggaggcagcactttgagacttggggtttaacagacacatgagtggcaaaggcattctcacaaaatgagcaggtagacggagacgacgtgtgcaggtggcaggtgggattgtctggggcagccaaagcccagcccatgcatggaagacagctggacccgaggctgcagagaggaggggcagggtaggaggtatggagagcctggtgctaaggccagcttgcaggctggcctccgtgactggctggaaatagtgagtgggataagaaggaagggacaggagtgacctctcaacttattttcttccttggatccctgggtggtaggcatccacatggggaagccgagccaatttggaggagacaatgagatgaccaggacaggtaataacacggaggataatggcaatgccaacactgcagacaacatcagtctttccattgaatgaggcaaaatacaaaaagaggtcgggtgcagtggctcatgtcactaatcccagcactttgggactctgaggcaagagggtcgcttgaacctgggattttgagaccagcctgggcaacacagtgagacccccaactctacaaaaaatacaaaaatgttagctgggcatggtggctcatccttgtagttccagctattcaggaagctgaggcaggaggattgcctgagcccgggaggtcaaggctgcagtgagctatgatcgcaccactgcagtccagcctgggtgacaaaacaagaccctgtctcaaagaagaaaagcagaagaaggagaagaggaaggagaagacagagaggaagaggaaaaagaggaggaagaggaagagaaagaggaagggagagaggaaggatagaaaatcccaggtagtgtgaagatgtaaatgtggcaaaacaaaaaccataaaaccccaggtgaaaattggatgaacatttttataatcttggaatagggtggattcacaaaatatccttttttaaaaaaaaaagtgtaattcttttttataaggggtacaagtgcagttttgctccgtggatatatttcacagtggtgaagtctggccttttagtatagccatcaccccaagagtgtacataatacccgttaagtaatttctcatccttcactcctctttcacccttcagagtcttcaatgactactcttccacactctatgtccatgtgtctaaaatatcattctaaagtcacacctgctgcccaaaccatcaccatgacctgcccctcccttgggctaaaaacagctttgtcattaagactgctttattaagatgccaattctccctgggaggtgggatcacctgcagaagtggcttatgggctttctttccaatcctacaatgcacaggagaagcgacggggcttggcagaagacatcttggtttggaagtaaggaggagagctggggagaagacatgatccttggaaccccaaggagggacagcagctcccaagatttctgggttgcaggagggggatttctctgccactccctccccacgaggaacccagtcctgtgccctgcgttgtagatgataaaaagatcattacgagtcgatgtactacatgaataggttcagtgtctaggggtgaagggaaggcccagacttaaactcttctgaccaagttagtctaggaatcaaacatgtcctagccgagagagtcccgtggcatccaaaggactctgaaatccctccaccagccagattccctctttcatgagacttcatggaagttgcctgttgatgctagttcacattttaacgtcagatcacctagctgggtacaaaagggaatcagtagaacctagagaatgcaggtaaagtagccgttttctgctttattgctgtggttcagctcttaggctttgacaaaggtgatggcttctggggctgggtgcagcggctcacgcctgtaatcccagcactttgggaggctgaggtgggctaatcacttgaggtcaggagttcgagaccagcgtgaccaacgtggtgaaaccccatctctactaaaaatacaaaaattagctgggcatggtggctcatgcttgtaatccgagcactttgggaggtcgaggggggcagttcacttgagatcagaagttcgagagcagtctgaccaatatggcgaaaccccgtctctactaaaaatacaaaaattagctgggcatggtggtgggtgcctgtaatcctagcctctcgggaggctgaggcaggagaatcgcttgaacccaggaggcagtggttgcagtgagccaagatcatgccacttcactccagcctgggtaacagagtgagactccatccccctcaaataaaagaaaggtgagggcttctaaggccagacttcagccccaaatctctactggctgcctcttgggatatacagaaacctaatctccaataggcattccttgaagcaaaaaataccctattccttacttttttatttcattttaagggactttttttggttttaattttccaatgaacatggtttgcactaacatgataattgcactgaatatatatatatatatatatatatactgtttcttggtgtgattcccatgaataattcaacatgagaggtacgccttggaaaattatcacatgaaattcacagagagaagctagaaccaagttggagggtcagctgtctaacatcttgttatctgtccagaagtagccataaattcacgcaaaaagcaaaatctccggctcctgggagcagaagggtcgctggaagccaatcaggaggacatggctttatttaattgaggactaaatatctttgggattgttgtttgtctcccaaggacggtcactttgctgtaaaggcaatgtcagtgtttccctggtggttccattccctggttagacccggatttcctctctgcattacatattccatattataagggtacaatctgccaagccagtatttggattctcagcatcgtaccccatatcccggagcccatgttgcccccttccccgcctcagtcaggtactcagaggcccccactcattagccacagagtcacagagactcgcatggtattaagacagcaatatcatcttattggctattagcacaaatgtgccaataaacatagtgcataaaaattatacatattccctcagagtccataatcccgaactgatatggcataatgcaaaacacacttccccaaaagtagtgcttaaagtcacggtgtacaaattgaattttaaataaatttcctgaaacatcatcagtggttctggccacattagcaatacacatttgctaaaaataaagtgcagaatggctgtgcccagcccaaccccaaagggatgggaccagtgggcatttatttgccctcaagtggtttcagagttgggctggctgcacatgtgttcaggtgcagttgttacaacagcccaatagcttcccctcaagggtttcccctaattatcagtgatcatcaggttccaaaagtcagcttgtcttcacctcattctctatcaaagagggagatgttaattgcattatcgccttgccaacaccctctgaaatgatggcagtgatcattaacagcctaccacggagccaatcagagtcaatccaaattcagaaccagccaatggagtgcttcctaatcccacgtgtgtgtaaacactgaaaacataaaaacacaaggcagccattgtggagaatggggtgctgggggtgctgaagaccagatccgccatcaactccataaaatatttcactggttaatacaaacacacacagacacgcatacacatacacacacacacatgcacatgcacacaacgcagtgaaaagctagaagatccccacaagccttatgattttttcccccagccctctgcatcccagaccaagctaattgaccagcaaagaaattcaaagtaatgcccagttgtctggttttatttaatgaagaacctctccaagaatgctgtcagcatgtcacctttcacagataaataaatatttgtggttccttgcatgttagtttcagtagacaccaagaccaaaaataatttgcccttgttcacttgacttcctttcttaaatgtacaaagtaaggctgtggttttcctaagtgtgttctcgttcatggctcacctaagaagatgccctttggactgacctagaatccaactatcaaaatcctgctcaaaactactcaagccctggttcaaaccccaaccccccatatctcctttttcaaccccatccaaagagggatgagtcattgaatagttgatatctttctgctgttaagagcgctttcaaaaacttaatcctcaagggaaaagtgggcaaataaacaacgcacaagagaagaaatatacacacacaagagacgtatggaaatgtattcaaccgccaccataaaagaaattccaattttaaaaattttgatctatcaaacaaacaacttggcagagactacctcttatttggaaatctaggctgtcactctcccacaaagctcacagagccaaacttaccagggggacaaatatttcaaaataaaggggactcactacataggattttctcttctaggacttcaccttaaagaaatatccagagggcaccaagtgatcaatggttaaaaaaaaaaaaaaaaattggccacaacttcactagtaatgtgaaaaaatcagaagcaactcaatgtttgccaaaaaggaaatggtcaaacaatatgatgcatctgtcagaagacaaaactgcaactgacccttgaacaacatgggtttgaatttcttgggtccacttacattcagattttcttccacctcgccatccaagacagcaagaccaacccctcctcttcctcctcttcctcagcctactcaatgggaagatgatgaggatgaaaacctttgtgataatccatttccacttagtgaacagcaaatgcattttcttttccttatgacttttttaataacatttttgctctagctcactttattgtaagcatacagtatgtaaaacatgtaacattaaaaatatgtattaagtgattgtttctgttattggaaggagtccagtcagcagtaggtactagtagctaagttttagggaagtcaaaattatatgtagagtttcaaaggcacgatgggtgggtggagaagaatgggcatccctaacccccagggtattcaagagacaacagcacaacaaatgagtttaaagtgctcaattggctttatttgcaattctagaaccaggcaacactttattccaaaacacagaatgagtaatccagtgagccccgcagaatttgctttattgacagagaaggctgaagaaagcagaaacaaagaacaaagggaggattcgttacttttagacagaacaatagaaaaataactgattagttaatatcaggttactccaggcttccttttttgtgtgaggattaaagcagagggaacttcattatcatgcggattgaggactgaaacagacctgtttgggaaagtggctgttatctctctccggatttctgagaaggtcagataacaactgagtttagttttggtgacggggaactgaaacagatccaacacttccttagacagtgctttcggataaacatagatactaactcttctgctcttaaagcttatttattttttgttttgttttgtttttaaaattttatcttactttatgttctaggatacatgtgcagaaagtgtgggtttgttacatgattaaatatgtgccatggtggtttgcagcacctatcaacctgtcatctaggtattaaaccccacgtgcattagatatttgtcctgatgctctccctcccctcgccccggcaacaggccctggtgtgtgttgttcccctccctatgtccatattttctcattgttcaactccctcttataggtgagaacatgcggtgtttggttttctgttcctgtgttagtttgctgagagtggtgatttccagcttcatccatgtccctgcaaaggacatgttctcattcctttttatggctgcatagtattccatggtgtatatgtaccacattttctttatccagtctatcattgatgggcatttgggttggttccatgtctttgctattgtgaatagcgctgcaatgaacatatgtgtgcctgtatctttgtaaaataatgatttatattcctctgggtttctacctagtcatgggatttctgggtcaaatggtatttctggtcatttgtttaatctgaattccttcctcaggaaaacactcccagaccccacaaaaagtatgaaagaactgaaactcaccagatcaccacatccagacaaggagatgccagacccctcactcatcatgattgcctcctcaccattccccagttcctattttccaacacttgttacatttcttccctgctgcataagcctctaattttagacagccagggagaggaatttgagactgacctcccatctccatggctgcaacacccgattaaagccttctcccttggcaataattgttttctcagtaattggctttctatgtggtgagaagcagggcctagacagaacccctggtgttttggtaacagcatgttagaatgaggaactccattttgatttttagtctggtctgttgaagcctagtgcagaagcttagtcgaaaacaatagcctcctataacttttatttaacacatctataaaatgcaactctgtgaattcttaaaatcgaaccaaaaaaagtctgaaaaccatcaaggacatagaaaatgtttacaatatgttaagggggaggaaaaaaaagggcaggatataaaaactatatgtatagttgaatcccaattttgaaaaaatagtaagacatctaaatgcccacaggcctgtaaagaaatgcataaaaaatttaacaaggtttatctctggatagcgggattacaggcagtttttattttctgcttgaaacttccctgtatttctgaatgttcaaaaataaatttgtattactcctatattcaaaaagcaatgttttgcttttgttctttacaggctctgaacccccacagctcttgctgtcagaatgacttaccgcaaactgcacacgactccccagctctgcaagaactcgttctggcttctgctcctggctcagcctcctgaagcccaggaatcaaggcttctcctcccttgctcctcacccaaggtctatgggcttagctcttcttcttgttctttagatttaaggggtacatgtgcagatttgttacagggatatattgtgtgacgctgaggattggggtacaagtgattctgtcaccaaggtagtgagcatagcactgaataggtattttttcagcctttactccctccctcccctctagtaatcctcagttgtctgctttccatctttgtgtccatgagtacccaatgttcggctcccacttatgagtgagaacatatgacatttgcttttctgtttctgtgttaatttacctagaataatggcctccacctgcatccatgttgctgcaaaggacaggatttcattcttttttgtgactgtgtagtatttcatggtgtaaatgtgccacattttcttcatccaatccactgtggatgagcacctgggatggttccatgtcactgctattgtgaatagcactgcagtgaacatacatgagcaggttcctcttttgaattcagttccttatttttgatgtttgccctcaattgcccacactctgaccacttagctcataccaacaagccccagacaaggtgtcttgtttctgaggaattagagggcaggaatagggaaaggaagaaagaggaagtaaaaggtgtaagaaattctccttgctcatgatagaaagctgtagacccagcttgggcatgcgtttcattcacagggatttctttttagggggttatatatccagctttattttttattataatcttttttatttgtatgaatggatagggtgcgagtacaatcatgttacatgcatagattgtgcagtggtgaagtcagggctttagagcatccatcctctaaataacatgcatagtacccaatgagtaatttctcattatccacctcccgtccaccccacccccttctgagtctccatcgtctaccattccacgctctacatccacgtgtacacattatttagctcccacatatcagtgagaacacgcaatatctgtttttctgtttctggcctgtttcacttaaggtgacgacctccagttccatccatattgctgcaaaagacatgatttttttatggcttaatagtattccattgtgtatatgtaccatattttttccacccatttgttgatgaacacttaggttaagcagtactacaataaacatacaaatgcaggtatcttttttgtataatgatttcattttacagaaatttcttgataattagttgtcataagagtgagggatggggtgatactgtggcctgcagttccatctgtgagcctctgccttgggtggcctgaaaaagatgaggattttcaggccaggtgtggtggctcacaactgtaatcccagcactttgggaggccagggcaggtggattacctgaggtcgggagttcaagaccatcctggccaacatggtgaaacctcatctctactaaaaatacaaaaattagccaggtgtggtggcaggcaccgtaaacccagctacttgggaagtcaaggcgggagaatcacttgaatccaggaggtggaggttgcaatgagatgagatcacgccactgcactccagcctaggagacagagtgagactctgtcaaaaaaaaataataaaataagaaggaggaggaagaggaggaggaggagaaggaggagaagaagaagacagggattttcttctttccattgggacctcagctcccaggtgggctgatgatcacatcaccaaaccaaacgtaattccagcaatggacagagatacagaattctgttccgatactacagtaaaatgagctatgttggacttagggtcatcgtctcatacaatactttcccaacaggctggcaagggaacagtggctttttcctggttttactttgcacactaccttggatcctacccctgagtaccctatgaatgtgccattttgtttggtcctgaagtgtgtactttccccatcctgtcagtttcctgggaagactgtcagtgcccctgatgccctgcgcctccctcacaattttcctgccattctcccaccctggccagcagtgggagcatgccccaagcagcaggggggtcgtcccaccatcatagctattgccggcctgagatgatagatgccactgtggaagggacagaagagcttccatctaaccgctcctactgacctcaccatcagtgatgcagatgtacttgtcacatcataaacacttggcacccattggctcttccccaaatggctatcagaattgcagtttcagccaccagcagctctccgatgggcacaggctccacttatggctggtttggaatggcaaatccatcactctctttgcctgtaaaatgccaaggagactgatctaagcagggggttcccatccatggcctgctctaggcctgaaggaacacagatggcatttgcaggaagatgacatctcaccatccccatctgagcaaagcctgcccatcaaacaaccaaaggatagccagtcccctgcacagtgtaaagtgacttgcagtgatcctcttccccaaggccagccccagctctcagacctccagtcccaacaagtctttttttgcaaaggaggctcaccctggaacatggctctcccaaggggagacaggaacggatgttgacttcatcccagcagcttctgacacaatgccactatctttcaactttctccaccaacagggtcaggctgttgattggcctcgactgcagttagcctgacacggctagcagcctcaaaacaaattaaacgaggcagggatgccgtgcagtgatcgttccattatgtcccctctgcttccacacgtgactcacactatcacttttagaaggtgaagcatcttattgaatcaacacctaatctgcacacagtgtcacggaggaggggcgaggggacagcgggagcattttctctgatccttttctttcctgaagacttcgctggagacaggctgggtgggggcgaagatgaattgtgaggaaccctgaccctatttcaggtaagcttctgatttactgttcattgtgctttctaacgaataatttttatataataatgccaccagtaagcaccaaacccttcttcttgggaatgcaattaagggaaaaaatagcaataaattgttttcagtacttaacccagctccaaatttatggctgctgaaatttattgtttcaggggcctgaaaaaatggcgattaattttattccatttcctgccattcaccctcaaaactgaaatataaataaggagctgttctcggcctcgggttttcctgcctgttagaaccctcaaaactacagctctccagacagctacctctgaaggctcctgaagcttagaaacagagaggaaaacacccctttatctgcacgtgtctccaccactgcaattgctggaagctccacgagtgccctcggtgcacagatgtgctttacaacagagtgactgtaaatgagaaaacactaagttaggctctgacggccaatgctggatgtatccgtttgccctataaataagcactgatcacctccattttattgaactcattttctaggcaagcaaagaccacaagattcttctgcacattttctctttacaccctctagtactgctgctactgtcagctccgacagatttatagcccattcattcatgggaacaaaaaccctgccacggctggtcatgggacacgcaatagcagttagttcaaaagataacagctgcaatacctcacctctccattcagcactacagagccagcactacttcggaggtaataaatgcttcttgttagtgtgctttgagtcataatcctggaataactgtggtcggccttaccccgggccccgcccctagggaaaccgctttctgccactccccaacacccaccccgcaccttcactccagcccctttctgccagaaaagaggggagtggggggttgaaggcagcccactgcgtaaccaaaaagtggaccctgtctcctttttccagtccacccaacacaagctgggttgctgaacctttgcaactcaagcacttaggcaacgctgaaaagccgagcttcctcgtggtaagtggcaatgtgggtatatacattctccttgcaaactgatcagaaacagagctcgggcatgagtcctgtcccgacaagaagaggcagctggtctgactagtccaccaccatcctcagagcctggacacacacaacaagcatgtattaaaagaatccatggattttttttttaagtagtgaatgacctggggaggaatagaggatcggttccaccccgctcactcagagcaggaaaaggtttaatgcaagaagcaatatagtggtgaagcgttctgcctcattttgaagtcggcctttcccacccacaggcctcagtttactcatcttaaaatggggatgttaactgtaccgattctaccaacaaatcagggatttgttgctagaattaaacataaaaagtaaatacctttaaaaatttatcacaatgctaaccaagtagtatgcgttatcaaataaattaattagtttagttggagaaatcagatatgcacacaagaaacttaaaggaagatcactagaagacaaggtcattgacgatcaaactttagggaaatgtcttccatttttgaaaccctccaacaagacacatacacctgcccccacctctacctccaccagcgctctgtggcctatattttgcagagatgtgttattgtcactgttagtctgatgtcccgacaattaaactgcaaagagaaaaaggccagtcatgcagaaatccaacagcctggcctctgggatccgcccaccctagcaatgggtccaggtgggagatgggtcatggagatatggctggcccaggtcaggcagttgaaatggaagttgagagcctccaggctccagaaggcaccagagagagaagcaaagtcaaactccccatgaagacacacagttcagtggggaaagagtagactgtgaaacgcatagaaaaagacactgggcattagttgctatcagtacattcctccctaatcaatcagctttattgtgacgcctctagctcggctcataaggcctcagctcataaggccggaaagccgcttcggcagcagtttaaaatgtttccagtttaataatccctgctaattgaaagcagctcagaaaagcggggaagatgggggttggaagcaaaccagcaccgtttatggcaacagtgctgttcctaggggaaacaaaataacctttgatgctgcagggggaacctgcctccccgtccccaaacaaactaattcccacaactgtcttctttggcacgagagctgtttcttcttacgttttaattgtataatgttatagcagccgaattgctgtgaaatctgtttttaatctgtggccccctgctgcaaaaactggattattttttcttcaacagagaattacattcatttttataattgttctttcctttcaaatcacctaatatgacaaatgctggacaaccttacagctcatctgctgaagagtgtctttatgagttgaggcttcaatgctttcatggagaaattgcctgatttaagtaaatcatgtcactttcacccttgcaatcgtatttgtttcagacgtctgctgacctaacctgcagagcaaaaacaaaacacgtttacatttctaggctgagatatttagttcaaacgatgtacaaataggtcataatgaaaagtaattttagtacacggcaaaggtatcatttaagtatacttttgacagtttttacacatacataattattccagtattgtaatttaaatggataaaagacagatcttagcacaaaagcctccatcctggtttctcggaattccctggcagagctacagttggggacatggatatagaagaaggatgtcatgtgtctgatgtaccatgaatcagctgggctcaaccttcaccctttggatccatgcaaacctaccctagaaggtggatccagacacctagatcttttttttttttttttggtattttctttttatttttgtgaatacacagcaggtgtatatgtttatggggtatatgagatattttggtataggcatgtaatgcataataatcacataatggaaaacccatcccctcaagtatttatcctttgtgttacaagcaatccaattatacgcttttagttatttttaaatgtacaattaaattattattgataggtcggacaaacacagcctgggtgacctggtcctgctgtgtccccacccaaatctcatcttgaattgtagttcccataattcccacatgttatgggagggacccactgggagataattgaatcatggaggggttcccttttagtgttctcatggtagtgaataagtctcacaagatctgatggttgtatgaggggaaacccctttcgtttggctctcattctcttctctcttgtctgctgccatgtaagatgtgcctttcaccttccaccatgattgtgaagtctccccagccatgtggaactgtgagtccattaaacctttttttccttataaattgcgcagtctcgggtacgtctttacgagcagtgtgaaaacagactaatacaccaagcatccacctgcggccacaagaggatggctttgtattgagagacatgatatgtaagtagcaacagaagtgtaaatctgagtattcctcctcccctccagaaagacttgaaacatggaactggagggcactgagttttttagggtgattgccagatgtgttgattagtgaattaaacaaggctgcattcacaggaaggcaatgtccgacactgagaggtgcccccccgtctgggctggagtagttccttttgcagggaaacaaaccagctgaagtatgcctgggaaggaggaaacaggacagttttccaagtgtcatagctgaacaacaggggaagaaactggagaagagagaactctaggaaataggctttctgtctacaaatccccctggttaaccattccagagcccttgctgcctactggaactgagatgagagctttgcacaagatcttcctcatgcctcactgcattgtcagttgaagataagcaggaccatggtcctcgggtgacagatgagaaactgagactttgggagggccaatgactcacccaggatcatctgctatgacatgatggagcaagagttcatacccagcatcttgttttgattctccaatctcacctaaggtcaggagttcaagaccatcctggccaacaaggtgaaaccccacctctactaaaaatacaaaaatcagctggatgtgatggctcatgcctgtaatcctggctactcaggaggcggaggcaggagaatcacttaaacccaggtggtggaggttgcagtgagccaagatcacaccactgcattccagcctagatgacagtgactccgtctcaaaaaaaaaacaaaagaaaattactcaggagacacagccagtgagaacaaaacgggaattatttttaaaatttaatagagccaggatcttgctatgctgcccaggctggtctcgaactcccacgctcatgcaatccacctacctcagcctcccaaagtgctgggattacagatatgagccaccacgacaggccaaaatcagaatttttataccagataatttgactccataacttgtggtgccagccactgtgctgtgctgctgcttctgtgtgtatatttatgaaccagtttgtcttgaggaattaagaacccaggtgtgccattcattgtgcgtagcaagaagcttgatgctgttttatcactgaatcatcccaacaatccaatgaagttgaaatgtttgtcccacatatcagaggggatattgaagcacagaaacttgaccagaccctactgctaataaactcagaaccgggatctgcctgagtccctctgttctcctgaggatgaagatctgctgtctaaggatgttcaccaaggcaggtcttaggcttagaaggcgacccagccccatctggagcctccttcccagccaagtctggcctgcagtcatttgtctccatcaggcacagccattgttctccaaacttcctggatccctcttcctgaaacaaaaaccttcagttccaaggaagccctcactttggagagaacaggaaggcacagtttcatctttggcacttctcaggcaatacttcctcactgtccaagggcaaaaataaggtggatatagcccaaaaaagggacatagtgctctgagaatttagcttggcttggagaagcctgggaatatgtatgcatacacacatacacatgcacacacacacacaaatacacacaaatgcacacacacacacagagtttcctatgttccaaaacaaaccaaactttatgctttcacctggtaccctgcagccctggagttttctcactttcaacctcagacccaaagaggaacaaagagaaagggaaagaaaatgcctttgggttgagtccatttgaccctgatccatccagaggaggtaatgagggcatgacaagttagtggccagacagggacaatgatggcacctaattctctacatagagccaccctctattcagggaactctctgctagtccttttttttgttttttagacagtctcgctctgttgcccaggctggagtgcagtgacgctatctcagctcactgcaacctctgcctcctgggttgaagcaattctcctgccacagcctggggactacaggcacccgccaccatgcctggctaattttttttttagtagagatgaggtttcaccatgttgaccaagctggtctcgaactcctgacctcaggtggtccacttgccttggcctcccaaaatgttgggattacaggcatgagccaccatgcctggcctctgtacaagttttgaagcttagtttctctgttatacactatcaaaacactgggagcacacacacattctagaaggttgatatcattaaatacctctcttcttctgtcatggtggcaaaaagagaaggaagacatgcttcccttttacttggggctgccataacaaacaagaaacaggtgctcttcaacacaggggaaattccctgcttgaggagcctctggttgtgggtcacagaagctaaatttggggccaggtatggtgaagcattcctgtagtcccggctacttgtgaggctgaggaaggaggatcacttgaggcaagaatttgaggctgcagtaagcagttatccagcctgagggacagagcaagactgtctcaaaaaaataaaatggagtgttacaaaataagtaaataaaaattagttttaggctgggcatggtggctcacatctgtaatctcagcactttgggaagccaaggtgggcagatcacttgaagtcaggagttctagaccagcctggccaaaatgatgaaaccccatctctaccaaaaaaatacaaaaattagccaggtgtggtgatgcacccctgtagtcccaggtactcaggaggctgaggcaggagaatctcttgaacccgggaggcagaggttgcagtgagccaagattgcaccactgcactccagcctgggtgacagagtgagaccctgtataaaaaaaaagaaaaaatatttaagagttttaataaaataagttaacttggcaaaggaaagcaactgccaatctacacttttccctaccctctttgactgggcctgaaatatctacataggcatgccacactctctctcagaaccccctactggataaccctatgacctcccccatgtgggagagaaaaaacagagaaatcacaagacaggtggaaatatgtagccattcaagatgcatacataaatctgcacaattagagcaaacatcacattatatggcagagttagtgcaagaaacaggagacaagtgcaaagatgctctaggtgtgtccttccgagacatttcaactacaaaactctggcaggtagtataaaagagaaaaatctaaaaatattgcttttggatcgagaaatatgattgacaaatttttaaatggagaattagaagacaagctcaagagatagtaccaggactcaaagataaatgcaaatgagaaagaaataagaaatagcaggcgaggcgggcggatcacgaggtcaggagatcgagaccatcctggctaacatggtaaaaccccatctctactaaaaacacaaaaaattagccgggcgtggcggtgggtgcctgtagtcccagctactcgggaggctgaggcaggagtatggcatgaaccagggaggaggaacttgcagtgagctgagatcgcaccactacagtccagcctgggcgacagagcaacactccgtctcaaaaagaaaagaaaaaagaaacagcaggcacttatcctggatataacagtggtttaaaaggaaagaaaagaagagtggaaaagcaataattaaaaggaaaacagaaatcttccttagggcacatgaatagggacgtcttcaaggtagaaaaggatctctgggaacaaaatccttacccagaaggaactgatacaggctatgcttcaatttcacacaaaaagacaaaagccctgtaagtaactaagcacaaaatgtaaatgagctggaagcttctattaaaagacttagtttgggtcaaaaacaaaatccagctttgagctattacagaggaacaaacctataataaaatgttccgaaaagctttaaaaatttatgcatttattcattcaacaaataaatattgagttttttccatgtgccaaataaagtgatgggcaacgacttaccaggcaaacacaaacaaaaataaatcagagacgataatattaatatttaacaaggtagagattaaagcaaaatggtcaaagtgaacatttttctcttgatctttgccaggtataccgagagaaaaaaagaagatttaaccaatattattaacaaaattgaatatatatatggtatatttacacatatatacatacacgtatacaaaccatatacccaaaggtctaatacagtatttgaacaaaatacatttgaatagtattattaataaacttgaatacacacactcacacacatacaaacatttcaaacctatactcaaaagtctaatatagtagccactaaccatgagtggctatttaaatttagattttaactaattaaaattaaataaagtaaataatcagttcttcagacccactagccatgttttctgagtctagtgggtactccaccagtcagggcgggtatataacatttctattgttgcagacagttctgctggacagtgctgcatacacaaggcagtttttaaaatgctacatagcatctacaaagtgttcctgtaatataacatgcacaaaagaaggataaactttttaaaaatttaattgagattagtaaataaaaatcaggatcttagcacaagacgtgctcattgttactagcgtgtcattgtttctaggacctctcagcagacagagctgggaaatacatgcacatgtacacacacattaaataggcattaatatttatttctgtatctatagatgatggtagatgatagatagatagatagatagatagatagatagatagatagatagatgatagatagatattaaaaaccatgagttcatctgccccttttgattccaattcagcacaacaaggtacatttcttttttttttttttttgagacggagtctcactattgtcacccaggctgaagagcagtggtgcaatctcggctcaatgatggaacctccgccttcttggttcgagcgattctcccatcttagcctctggagcagtgggactacaggcatgtgccaccatgcctggctaacactggctacatttctaacctcctcctctgcatgtttccccaatagtgagaaacccagttcccattatcctcaatacatggattcacttgctcatcctagaagtcacagaaggtgggttcaaaattccaacccattaccattgcaggaaggaaaccaactggaagcaacaccaatgaggaatccgtatttgtttaccactggttggttggtcagttagttggttggttaattggttggttctgcgtagggctccttggagaaataactgaactggggcagggaaaatccaagatgaccctgaaacagctttctgtgtcagaaattaaggaagcgctcaaagacttataaggatttgtcaaaaggagacaagaaccagattgaaggaatctcaactgccaaatctaggacaatttgaacatcaaaatatatccttagaggcagaaggatcacttgaggccaggagtacgtatgagaccaggctgggcaacacagcaagaccccattaccacacaaaaatttttttttaattagccaggcatagtggaacataccagtagtcccaactactcaggaggccgaggtggcagggtggcttgaatctgagagtttgaggctgcagtgagctatgatcacaccactgcactccagcctgggtgatagagtgagaccctgtttctaaaaaaatatatttttaatgtaatgatggtaatgtgttataacccattgaataaattaagagttcatgcatccatactgatataaataagtaatttttttttaaattaagtaagtggggagaaaaagctcttccctacagtacaatgctcattgataatatagaatgaacgctgaggttataaaaccatcagtgtatagtaaaactagtgggtgggaatttgatgaagaatatttacacagtgcaaaagtatctctccacaattaattactagttacaaaggagaagatagtaactttacagtggaggagccagctaggcaccaccttaaccaagtgatcaaagttagcagcaccgatattggaagaaaccaagttctgtgcctcttcataagatgcactcagaaaggcacgatgtcacttgtgggtattcctgttagaagtgcataaaccgaatctataaatgaagagtcatgaaatacacccaattgagtaactgttccagattaacgatggctaaagagacaggacaactgaatgcaactcttgatcctggaccagatactgcaagggaaaaaataataactagaaaggacaatattgggacaattgacaaaatttgaaaatggattatgcttgttttgaataatggactgggagaatctccaagtttctctttcctctgaaacaaatggcacagggattgtccatgccttgatgtttggaagaaattagccttaaaattttaatctagtgtcttgtttcggaagcagtcctttgacagtctttccagttcttctatgtttattagtagtagtatctttagatttttcaatatttcttttgttgacagttttggtaatccatatatttccaagaaacttgcaaatttagttaatagtaccatatcaatgtcaaatttcctgatttgggtaactgagctgtggttatgtaagagaatgccctctgtttattagtagtggtatctttagatttttcaatactacttttgttgacagttttggtaatggtaatccacatatttccaagaaatgtgtaaatttaggaaacagtgccatatcaatgtcaaatttcctgatttgggtaactgagctgtggttacataagcgatatactctctgtttactagcagtagtatctctagatttttcaatatctgttttcttgacaattttggtaatgcatatatttccaagaaatttgcaaatttagataatagtaccatatcaatgttaaatttcctgatttgggtaacagctgtggttacgtaggagaatgccctcattcttaggaaatagcaatgaagtatttaggggtaaaggggaatgatgcttccagtctattctcaaatggtttagaaggaatattagtatacatattaatgtatactaaatattagtatgtgcatattaattaatatatgtacagaaagaaagagaacacaaatggggcaaatttacacaattgatgaaggatatgtgggagttcataaactattcctataacttttaagtaagatggaaataatgacaataaaaagttaccaaaaattttaaaattattgacagtttttgatttttttaagtcgaactactgaataaattcaaggatgagtttctcaaaacaagtccctgtcaagtctaatcaagaagataaaagaaaaaaataatctctgctgtggcaggatggtgtcatccttataaaagagtatgataactccataacaatactttttaagtaaattccagactttatttagatgtcacccacttttcaactaacgtcctttctctgaaccagaatcttatccaagatgccccatttcatttagtcaccgtgtctcctcagtctcctctgatctgcgacagtttctcagtcctgctttgtttgtcatggccttggcagtttagacgaatactggcctggtattgtgaagaatgtccctcaatttcacaccttcagtttttaaaatctgaataagatttgcaaatttcttggaaacatatgggttaccaaaactgtcaataaaagaaatatttaaaaatctaaggacaataatactactaataataaacatagaagaactggaaagactgtcaaaggaccgattccaaaaacaagacactagattaaagttttaagggcaatttcttccaaatgtcaaggaatgaacaatccctgtgccatttgtttcagagaaaagagaaagttggagattctcccagtccattgttcaaagcaaacataatcttgtcatccaaacttcccaaagatataacaaaaaataaaacctatgaactaaactcatttgtgaatatagacataaacatcccaaataaaatattacaactcagatccaacaagattaagattttcttgcccatatgcaaaatacctcaacattaaaaacatctattaactataattcatttcatcagaaagtcaaagaaggaaaatcacagtcatcttgattgatgctgaaaggtatgaattcaatatctcctcctgatgaaaactcactaaatttagaagcatctgatctcaaaacaatacaaaatagctacctcgaaccacagacattgtcacacatgacagcaaaaaaccagcatcatttccattcaagtcagcaatgggacaagggtatctattatcaccattgacaatattcagcctgttctaggcaattcaatataacaaagataaaaaacaaaatgtgtgactattggaaagataggatttttttttttttttttttttttttttgctatttctcaatatgcttgttgacctagaaaacccaagagaattaactagaaataaaaattagaaaattcaagaaagcacagtctggtggcaatttacagagtaaagataatagatgataggtagataatagatagaaagatagatacatagatacatagatagataagatgctttcctatttattcacaatggccagtgaaaactaaccataattaataatgcaaaataatatcatccacaaaacaactggaaatctgaatgcacagaatactaaacatgaaaggtcatagattcctattagaaaaaccaaaaattaacagtcttcaaagaagatctgggtgaatggaaagatatatcacattctgataatactatagactttttcaattactttacaaataaattgcgatttcagtcaaaatccttgtaggagaaaaacattcataacatttttaaaaaaacaaaataggtattagaagaggcttaccctaccatatattaaaataaattacagaaccatgctgttaagacaatatggaacccactcagaaaagacagatgtaaaagaacataaataaaaatttatctgagaaaaaataatcaaagaatatactaaaaatatattgagtccatttattattaaagaaatgtaactcaatacaaaataacattttttggctttcaaatgcaccaacagtggaaaagagtataaaatacaattgctgatgaagaagtaggaaactatacacttccatacactatggatatgagggcaaatttctataacctttttggaaagcaacttggaaacatgtaagaaaaactttaaaatgtggcataaactttgatttaggaattttatgtttaaaattagaagcagttttgttttcttgtgatgtccttgtctggctttggtatcagggtaaagttggcctcgttaaaagagtttggaagtattttctcctcttcaatttttttggaagagtttttggagaattggtattagttctttaaatgttgggcagaattcaaccatgaagccatctggtcctgggcttttctttgttggttgacttttttatgactgcttcaatctcctccctcgttattggtctgatcagatttttctatttcttcatgatttcaggtcggtgtgttgtatgtctctaggaatgtatccattgcttctaagttaaccaattttttggcatataattttttttttggagacaggctggagtgcagtgtcacccaggctggagtgcagtggtgcaatcatggctcattgtagcctcaacttcctgggctcaagccttgaactacagatgtgtgccaccatatccagctaatcatttttttaataatttttttttttttgtagaggcagaatctcactgttacccaggctggccttgaactcctgagctcaaatgatcctcccaccacagcctaacgaagtgctgggattacaggcatgaatcaccatacccagccagcatataattattctaaatagcctcttatggtcctttgtatttctgtggtgtcccttgtaatgtctcctcttttatttctgctctctttctcttggttagtcaagctaaagtttggtcaaccttgtttatcttttcaaaaaactaacccttatttttattgcttttgtattgttttctagtctctatctcatttatttcagctctaatattatttcttcagctgctaacattgggcttagtttgtttttccttttctatttccttgaggcataacaataagttgcttatttgcaactcttcttttttgatgtaggcatttattgttatacactttcctcttagaactgctttggctgcatcccataagttttggtatgttgtatttccctttttgtttctttcaagatatttttaaatttctcttttaatttcaccattgacccgatggtcgttcaggggcatgctatttaattcccatgtatttgtgaattttctgaaattcctcttataaccaatttctagttttataacactgtggtcagaaaagatacttgacatgatttcaaccttcttaaatttggtaagatttgtcttgtggcataacgtctgatctatcctggagaatgctctatacgcacttgagaagaatgtggattctgttgctattggatgaaatgctccatatatttctgttagatccacttggtctaaagtgccttagtaattttctgtctggataatttgtccattattgaaagcggtctactgaagtcccctactattatcatattgcaatctatctctcccttcagattctttaatatgtgctttatatatttgggtgctccaccattgatgaatggataaagaaaatgtggcatatatacatgatggaatagtattcaaccttaaaaaaaacattctgtcatttgcaacaacatggatagaatggcagaacattacattaagtgaaataagccgaatatagtaaggcaaatactgtgtgttctcacttatacgtggattctgaaacaattgaactcatagaagcagagagtagaatggtggttaccagaggctggggctgtggggaatggggagatgatagtcacagagtacaaagcctcagctagacaagagaaagagatttggttttttatatcaattgaacatcatggtaaatatagctaataattgagctctgcgcatttcaatataactaaaagagtacatttccaatattcttatcataaaaaatgttaaatatttgagatgatagatatgttaattaacttaatttactctttccaccgtgtattcaaaaatcataacaccactttgtaacccaagaaatacatacaactgtaatctgtcaatatataacaaaaatattttttttaataaaataaaattagaagaaaccatccacttgacctcatggaatactatgcaatcatttaaaattgcatccttgaaagatatactattaagtggagagatgagcagcatacattaagtgaaaatgcatgttagtgattttgcataggagaatcccaggtttataaaggagcaggcatccagagaagatggttagtataaacagagactcagaaggacaggcccatctgtttccctgtaggtgtagtgtctcggtcatcagtcagccatgttgctgttaatcttcccctccttaccttctttttattttattttttttttttttgagatggagtcttgctctgtcacccgggctggagtgcagtggcatgatctcggctcactgccacctccaccaccaaggtttaaatgattcttctgcctcaatctccttagtagctgggaccacaggtgtgcaccaccacacccagctaatttttgtatttttgtagagacgtggttttgccatgttggccaggcttgtctcaaacgcctgacctcaggtgatctgcctgcctcagcctcccaaagtgctgggattacaggtgtgagccaccacacctgacccctccttagctttatcccttgcattagagggtcagcttctggacggaagggttgttattcattcactcactcattcattaattcactatgtgagtcaggcatggaagtaaacaaagaccacccaaatgagaacaagcaaaggctatttatttagagcttgctatgtcaagagagtcagcaaccatcactcacatttggcagagactcacagggaggcagagaggtgggaaaagtttacagtggaaaaagagaaggcttccagtgtgccccgttagtgggggaagctgtaggcagctaactagaagcagggcatcctatgtgatggtttaagtgggcatatttggctttctccatgtgaagctaagttagaagcagggacaaaaattagggacactgtccctaattcaacaagtcccagccatttaagaccaaatgttacaagggttgttatttgtcatcctggatggttgctaaagatgggagtttgacttcttaaattctttgctgccgatcgtaggtcagagttctatcttatatatggtctggttattgcccgtatattttgtctcttgtaagcactgggaaaaacaatgacttagaaaggtacctgaaacccattgcttgccctcagggagattatgatcaaacagaaaagacatcctattattttggaacgtcctggtgacttgttcatgttcaacagtagggcttctacctggcactacgaaagcacattggacttgagctaaaagccacaccccagcaccatggcctgcaagacccctgaggacttggctcttacaagccccttttatgtcatttctcactactcctcccctcacttgcacctctgcaggtcgcgctggtggtcctgccggggaaaaaccaccccttagatgcaaggagtgagggtattcaatgcctacggagcatttttatctccatgtgccagcaattctaagcaatgtgcatgatttaaaaaagaaatactcctttcaaatctattgttggtttaggttctatacaacgactcccattactttgtgttttagtaatatagatgcaagcttcaaattagcacatttttattacttacattttaatacacattgatttctacatggaacttaattcaaataactcctagttatagatgtgttcctgagacacacacactcaactatacgcatttatttaaagagtaaatttatagcagctcagaattgctgaagttcactttgggcacagtccctgtccccaagctgtgtggaactacacatccctgcatttaaacagtaggttcaaaacaaacaatgctagcacagtgattgcaaaggcaaagaaacagaactgagatgacttcaagtctgtcatcccaagtgatcgtgtggaagttcattcatgtttaaaatttaaaacagaaggaactaaacagtgttacctttttgtttgataagcgcaaattttagttcacgcatgatttattgaattttaatagggtcttcaagattgaaatttgttagtttcaatcgttaattgaaaactaaaagagaatcaaaaaagttaaattgtacagcaatggagccatttagtactttttatcctggtgtgatgtgatcaatgaggttaatcagtcacaaaaaatatttgcaaacaaccagaatctcccttgaacaatgtccagtgaagcttcaagctttaaaactgttccttgaagatccatgctcagaaatggtggagaaagtcagggcgcagtggctcacacctgtaatcttggcactttgggaggccaaggcagggggatcacctgaggtcagaagttcaagatcagcctggccaacatggtgaaacctcgtctcactaaaaacacaaaaattagtcaggtgtggtggtgagatcctgtgatcccagctactcaggaggctgaggtaggagaacctcttgaacctgggagatggatgttgcagtgagctaagatcgtgccactgcactccagcctggacgacagagcaagactccatctcaaaaaaaaaagaaagaaagaaatggtgaaggccattaacaatgcagcacacaaatacaaaaaaaaaagaaaatgaaatagaaaaagaatcaaattttgagaaatagtgcaaggagaaacgacaaaagacacgagtctaacattgccagaagaaattgagagagcaaagcttcaaagccttgatcattttcaccaaagactggacacatggcccacagcaatggaactggtcatgtcatgctcatcatcatcccaccgttcttcctgatttttgtaaaagaagaaaaaccttgaaagtttttactgaataaaataggaatctatgatgaatctctggtgatgatattttagtggttttcaactaggggagatattttagatgggatttttatacatctctgccaaaattatcctcacgtttaagactttcataaccatttgtatgtctgttgtttcttgtgaaagaaactctttgaaattaaaactaataaagaagtattcttcaaccaactatgagtgaagacaagctgacaaatctggctgttgtgaacagtgaacatgtatagatgaaaaaggttgtcaaagccactggcaaatttgccgaagtcgaggctcaaagtgagaactatgatgtcattattcactgttgcaacagatatatgggaataagtttgtccacatggacgtaatttaataggattaatctattatgtatttttctttttgctatcgtaatttttcttctggcatgattagatataaaaagttcaataaaaggacttttttgctgtctacatttcttttctggtcattactactattactttcattgctgaattgttcttgaaaattattctggcatatagaggaaagagggtgttggaataatcccctctatgtctcaaatgcaccaggctcactctgcttccagtgcctcttgggacacatcaagctcttgtccaactctaagcctttgaacctgttattctccctgcctggagcaccttccttccagatcgtcaaggaactagactcttcccccactcaatattactctcagagggtgtctcagtctgttttctgctgctttaatagaataccacagactgggtaattaataagtttatttatcgtggttctggaggctgggaagttcaagagcatggcttcagcatctgccaagaacctttgtgctgcatgatcacatggcgggagggcaaagaagcacatgagacagagaaaaatgggggctgagtttcatcctttgatcaggagcccactccacaataactaacaagataacaggattaatcaattcaggatcaatcaattcagaattaagcaattcaggattaatcaattcatgaaggcacagccctcatgacctaatctcctcttaaagggccccacatcttaatattgtcacaattacaattaaattttggcataaggccaggcatggtggctcatacctataatcccagcactttgggaggctgaggcaggaggatgacttcaagctgggagttggagaccagcctgagtaacacagcaaggccctgtctctacaaaaaaaaattaaaataaaaattagaaacattaaccaggctatttttttacagtagctgcagtcccagctactctggaggctgaggcaagaggatcgtttgaccccaggaagttgaggctgcagtgagctatgatcgcaccactgcactccagactggatgacagagcatagatcttgtctcaaaaaatcaataagcaaaataaacagatttcaacatgagtttcagaggggacaaccacagcagagacgttttgcccagccgttttcacaatgtgcctgcttccccagtgcaaatctcaaagtcttgcatgaccctcttttttacttgcctgttcgttgtctgtgtcttgctacaggcatggaaaccccggggagggcggcttgtgccaccctgtttccccatctccccacagcacagcacctggcatgcaagaggcccacaggaaatatctgtggcatcgacccgtgagctcagaggagaagcacctggcctggaggggacaggtgagcggggtcggatctgccaagtgcaggcccctgaggcaagagccagagggaggcggagggagggctttcagggaattgcaagtggacagcatgtctggaggacactgttgtggctttgaaagaacagggaccttgaaatggtcatcgtaacccagggtagactgatgagggattttcggaggctgggcttttatgcccaagaaaataaggaggtgttttaagcaagggagtgacatgatctgatttgccctctggaaatatcactgtggcagggagagagaaaggaatggaggggcaagaatgggaagggaaggggaacatggcgaagggctgtgctctttagagcttccagaaaagaacaggggctgagatgcagactaagacgaccccttgctgctaatttcccctccaccctgcaccccaagagctaagatttctgccagtcctgggggaagtccttcgaggagggggacaggaaaagcaggagaccagactgccacaacaggcagggggcaggcgctggcaggcagcacagatgggtttctggaaggacactggtgctggatacagggggctcctaaccaagctgcctgtggggaacagagactgagaggagctacaggggataggatagaggcagaactcgcatgcttccagtcactctcctcactcacaggggagcccagggtcaggggaggccacagggcggtctctgaggactgacacaaatacagaatttctaggaaagaaccactgaaagatgagtgtccactgattttcctttgtcaaaatccagtttggcaacgaagcggctgcaaagagtgccccagccggaacccccagtatccatgcccagttcccaccctggggcacccaggtacgactggggctggcggatgcacaggaaccccctcctccccctcccacactggtggccaggaccggccttgtccccgactcagctgctgatgtgggaactctcctgggacccggagcaaggggcacgctttgaatctttacatgccacaaggaagaaaatcaatttcaatgcccaaaggagggaattactgcagcagaaggtcaccaaccactacaagttgtagtattgtcttggagacttggacggggggaaaatgcctccaagtgaggtaagagtgctctgaggtctgaagcaaacccttctccccaggaataatatgagatggtcctgggagggggacaagaccacacaaaggaagaaatttctttgtgtatgtacaactggggtgagattctgaattctggttctggccacttaggcaaggcctcaactgtagctgcagagctctgactcatgttaagtcttggaggaatggctgatattttaacagtattgtcacagtagcagccacaccagtggcaatggccactccacttaggcatggcagacacattccacagcccagcctccaggccctagagctccccagttaatgccaggttccctaagcactgatgcaaggatgctagatgttggatatttatttatgttccatctggctcccaagatgaaacataaattaaagcgctggctcacacttgtaatctcagccctttgggaggctgaggcaggaggatggctttaggccaggagttagagagcaacctggccaaaaaaaatgagaactttagatgtcacttattccatctctgctccattacagcaaagatggaaagaccctacccatgcccaggtaccttgtctttccttggggccagtgcagcggagcccagtcaaagcaaaggtcaaatgacaggtccattaggctggacatttacaatcccatttctgggtgtatagactataaggcagctgggacccaccttcttatccaggcaatgcaaagatgagcagagggtcactcaatgtcctgggattcaagagaaaaaagatgttgcaggttcagggaagccgctacttcctggactttctgcattaagtccaaagcccttatggatggtaaaaggcagtgcctcagccttgtttccagatcttcaaagttagagaaacccgtggcgtgaactgtattggccccagccaaagggccatgaaagcaacagtgtttctggaatgaaaacacctccatcttgagaaagtgggggccgaggcaggcaagcagagagcagggtgcgtgggagacattctcagtggctgtcctgttcatgacacctttcaccagaggctttagaggggcaacatctgtgtgccagtgcccctctttacagaggttccagctggtgaccgaaatagccaggagggtgctatggaggggccaggcaggaagtggggaagagcggttccacgcagcaactgcctggaaaccacaccctagtgctgctcacaggctgaggagaattaaaataaaattaaaagctggtgaaatgacaccaaatgcgcaatccataaaaaaaaggaatgataaattgggctccatcaaaattaaaaacttctgctctgcaaaagacactgttaaaagacaagccacaaacgggaagaaagtatttgcagagccatgtttgacaaaggacttgaatccagattccataaagaactcccaaaactcaataataagaaaacaaacaaccctataaaaacaggcgaaactttttaaagacacttaaccaaagaagatagagaaatagcaaataagtacatttaaaaggtgttcaatgtcattagtcattaggaaaatgcaaattaaaaccacgatgagatccactacacagttgttagatgagcttaaaaaatttgttcaagtgacaataccaagtgctgctaaatgtgggaagcctctggaaatctcatacatcattggttcaaaattagtacaaccatttggggcaacagtttggcagttttttacaaattataacccccagcagggcgtggtggtacacccctgtagtcccagctactcaggaggctgagatgggaggattgagccagggaggccgggcggcagtgacctgagattgtgccactgcgctccagcctgggagacagagcgataccttgtctcaaaaaaaaaaaaaaaaaaaagatagccctagagaaatgaaaatgtatgttctcacagaaaccagaatccaaatgtttgtagtgtatttactcataatcacccaaaaagtacaaacaacctaaatgtcattgaactagtgaacaaaaaaacaaactgtaaagcattcatataatggaatactgctcagccataaaaaggaatgagctactgatatacataacaccatgcatgcatctgaaatgtgtcatgccaatgaaagagtcagacacaaaagaatacatactgtatgattccgtttctgtgacattctcagaaaggctaaaactgtaagattagaaggcacttcaaggccaagcatggaggctcatgcttgtaatcccagcactttgggaggctgaggcaggaggattgttttaggccgggagttagagagcagcctgggcaacaaaacaagacttcatctctacaaaaaaaaaaaaaaaaatttaattagttggccgtggtggcatgcagctgtagttctggcttctttggagactgaggcaggagaatcgcttgggcccgagagttcaaggttacagtggttacagtgagccatgatcatgtcactgcactccagcctgggcaacagaacaggaccctggctcaaaagaaaaaggaaaggaaaggaaaggagagagggaggaagggaaggaaggaaggaaggaaagaaggaaggaaggaaggaagggagggagggaggaagggggagggagggagggagtagggaaggaaggagagaaagaaaaagaaagaaagaaagggaaaagaaaaggaggaggaaggaaggaaggaggaagggagggaaggaggaagggagggagagaggggaaagaaagaaagaaaaaaaaaagaaaagaaagaaagaagaaagaaagaaagaaggagagaaagagagaaagagagagagagagagggagagagagagaaagaaagacagaaagaaagacagaagccaggtatggtggcttatgcctgtaatcccagcactttgggaggcctaggcaggtggatcacaaggtcaggagttcgagatcagcctgaccaacatggtgaaaccccatctctactgaaaatacaaaaattagctgagcgtggtggtgcgcacctgtaatcccagctacttgggaggctgggtcaggagaatcgcttgaacctaggaggcagaggttgcagtgagccgagatcgtgacattgcactccagcctgggtgacagagtaagacttcatctcaaaaaaaaaaaaaaagaaaaaaaacgaagtaaggaaggagagagagagagacagaaagaaaggaagaaagaaagaaagaaagaaagaaagaaagaaagaaagaaagaaagaaagaaagaaagagaaaagaaaggaaggaaaggagagcgggggagggagggaaggaaggaagggaggagggagggaaggaaggggggagggaaggaaggaaggaggaaggaatgaagggagaaagaaagcatccgcagttgccagatttttttgtttgtttgtttgtttgttttggtttggtttggttaggtttggtttttgagaccgagtttcactcttgttgcccaggctggagtgcaatggcatgatcttggctcactacaacttccacctcccgagttcaagcgattctcctgcctcagcctcccaagtagctgggattacaggcacctgccacaatgcctggctaattttttgtatttttagtagagacggggtttcaccatgttgggcaggctggtctcgaactcctgacctcagatgatccacccgcctcagcctccaaaagtgctgggattacaggtgtgagccactgcccccagccctgttcagtatcttaattgtggtggtgattgtggggccatttgcttttgtctaagctcatagaacggtataccaaacagacagacttttaccacattgaattttttaagtgaattaatgtattaaaagggcgtttttaaaaactggtggcaagaaacttcttctcaaaatggatgtgccctttttcagcaaacgtgacaagcagaccctgactgttccatttaagagacacaggtcaagcacctgggagaagtctctgctggcagcctaggcgaatctaggctgagacccccaccaagttctgccttccagggacaactccagagcaaagtaggagcagagaaaaatcccagctggagcttggggctttcatggaggaggcagggtttaaattgggtcctgaggagtgggtaggatccagggctgtggacgtgggggaggcgggagtacatgcatgcacacacaaggctgattccgaaatagggagaggccagtgggcagccgtgtaagaggacagaccacacatgctgacgggaaactgcaagggtctggtcggcacagcccccgagaatcctgtggtgactcatttgggagccagatggaacataaataaatatccaacatctagcctacttagatcaacgagtacaagaggcgtagggaaggcctttttaccaaatgctgtgaatagcccatcagaaagaaaaacatcaaggagaggacgcaatgaccccgtcagctgacactgatggtgtgtctaccatgtgctctttgcaaaccctggatatataatgacacatctaatccacccacaagtccataagggactttcattaccctcattctgcaagtgagaaaatagaggcacagagagattgtgttacatgtccaggatcacatggagggtatgtaggattcaaatccaggcattccaactctgagcacaccctctaaactatatgctgagctactgcttgggtccaagtaattatgactgcagagagagcccaaggtatacttttccaattttttttttatttgagacagagttctgctcttgttgcccaggttggagtgcaatcgtgcaatctcggctcactgcaacccccgcctcccaggttcaagcgattctcctgcctcagcctcctaagtagttggaattacaggcacccgccacctcgccctgctaatttttgtacttttagtagagacaggtttttaccacgttggccagcctggtctcaaactcctgacctcaggtgatccgcccgccttggcctcccaaagtgctgggattacaggcttaagccactgagcctggtcatttttttttcttcacccatgtgtcagcattatgccaccggcccaccacagcctcccggtgtttctccagttgcaattcacacctgtgcagccttgttcagcaggcatgtgtgcacacaggtacacaagagcacacatgccccaagggcatcctttgcccccaaggaagccaagggactccactgagttaaatgacacagaagaatcacaacagactggatcttaaaagtaataagccttttccaaaagaggccaggctttacaagcagcagtgggagccaaatgacgtctaagcagaacagccaataaattaatttcatgtggaaaaaaaacaggttggcccagggataataaagatcccgtcaacatgaagatctcattacgacacagacttccctggcaagggtcgagtctgctgaagctgttttggattcaagcttcaccagggtcccctgtgcctaacaaagattccacaccaaatgcagaaaagatggacctgtctagacatcccctcacataaaccccacagcatcctcgtcagctacacagaagtggaaccgtgtaaagtttcccttaccatggctgccagcagccaggacaactggggggaaaaggcaaacacagctgttgactcaggaatagcattcaggctttaggtaggaattgttattgaacttctagaagattctgaggacttggtggaaatgaaaggggaaattttttttgtagagccagcaatccccttggagaagtagaggcacatcagtgactcatggatgaaattgcagactattccaaatcacaatttgcagtcattcagccagagctgagctcgagtctctctttggcatggctggaaaacaaaagggctcagtcagatcatggttaacgtaaagacagaaaggggatggagatcaaactaatctcattcataaaaataatatccattcagtgttcatgaacatctactcagcacctccggggaggcacttgctaggagctggtgcacagtagtgggtgtagtaggtgtgtgacctcatgaagcttccactgcagaacccagacattgcacacaaggaaacagcgctgactccagactgtggctgcacgctgcccacttccactgtgctcctgcactgctctcgtgggctgacggccacaggcttcagctgcctgtggatcacagcccaaggccttttcacttgctgctctctgcctccctcagaaaggctgcttgttctcatatgtgcgttctcggctcctctgcagggacccaccccaaccaactgtgaattcccaccctccctttcctcccccacccgctgacactatttaccccatgtattttcttcatataacatagtaaggtctcgtgcacttatttttcctatctgtctcttgagctagattgtcagcagctggtgggcaggaactttatctgtcttgcaaaccaatatctgcctggtgaacacagggtgcccggcacatggtcggcatccagaagattttttttaaactatgaatgaaaaacaaaggtcattatgagatatcccatgaggtatggggctaataagcttatgaggtatcccatgagataggggctaaataggttatgagatagctcatgagataggaaccaataaggttatgagctaacccatgaggtaggggccaagaaagtcgggagacagcccatgagatagggtctaataaggttatgagatagcccatgagataggggctaaataggttctgagacagcccataaggtagagaccaataaggttaagagacagcccatggggtagggactaataaggatatgagatagcccatgagatagggtctaaatagattataagatatcccatgagataggaaccaataaggttataagctaacccatgaggtaggggccaagaaagttgtgagacagcccatgagacagggtctaataaggttatgagatagcccatgagataagggctaaataggttatgagataccccatgaggtaggaaccaataaggttatgagatagcccatgagataggggctaaataggttatgagatagcccatgaggtaggggccaagacaattgtgagatagcccaagagacagagtctaataaggttatgagatagcccatgagataggggctaaataggttataagataacccatgaggtagggaccaataaggttatgagctagcccatggggtaggggctaataaagttataagacagcccatgagataggggctaaatagattatgagatacctcatgaggtaggggccaataaggttatgagaaagcccagtaggtagggcccaataaggttatagataggggctaatagagttacgagatagcccatgagttaggggctaataaggttatgagatagcccatgagagagggaggcctgatctaaatgtgtggctggggaggccctccctgagtggtgacatttatgccaagatgagaaggagaatggggctcaccaggtgcatgttgaataagctctctaggcaaaggagaaagcacattcaaagcttccaaggctggaaaagccttgtgctgtgggaatttacggaaagacatcagggctaaaataggatatgtggccagagaggacagcagggacatgtgaaggggtcctaagcctattacagatgtagcaggaagtccctgaggacttgaagcagatgcaggtcatcgtccagtttatatttgtaaggatcttctgggccagacacagtggctctcatctataaccccagcactctgggaggccgaggtgggcagaatgcttgaggccaggagttcaataccagactgggctacataatgagaccccatctctccaaaaaagtatataaaaattagctagagatggtggtatacacctgtggtccaagctactcagaaggctgaggtgagaggatggcttgagcccaggagactgaggctacagtgagctgtgatcacaccactgcatttcagcctgggagacagagtgagaacatttctcaaaaaaaaaaaaaaatcattctggctatttggtagagaacagattataaggggacaagagtagaggcaagaagacaaaaattagaaactgcagcattatgcaagtgagaaataattggggcggggtgttagcgagatgaagggtgaaaatggagggaagtgcatgcatgagggtgtctcctaaagttggccttgcaggctagatgagctaacaagggttaggaactacaaccaaaggccaggctcatgcctgtaatccccacactttgggaggctgaagccagtggatcacttgaggtcaggagttcaagaccagcctggccaacatggtgaaatcccgactctacagaaaatacaaactataactgggcatggtggtgcgtgccagtagtcccagctacttggggggctgaagcaggaaaattgcttgaacccgggaggcagaggttgcagtgagccaagatcatgccactgcactccagcctgggcaacagagagagacgccatctcaaaaaaaaaaaaaaaaaaaaaaaacaaaaacaaaaaaaaaaaaaacaggacagcaacgggggattgtttcaatgatataatttacaaatcatatatctatctgataagggtcttgtatccagaatatagaaataactcttacaactcaacaataaaaagacaaaaaacccaattttaaaatgagcaaaggatgcaaatagacatttctccaagaagttatacaaatggccaacaagcaaataaaaaacgtccaatgactggtcatgagggaaatgcaaagcaaaatcataatgatgcccatgggatggcaatcagcaaaaaatgtaaacagaaaataacacgtgtcagtggggatgtggagaggaaccctcattcattgctggtgggcaggtaaaatggcacagccacagtggcaaaagttaaacatagaattactttgtgactccgcaaattcagtcctaggtatatgtcccaaagaactgaaaacaggtactcagacaaatacatgtacacccctgataccacagcactttcacaataactgagagatggatgtaccccagggctctatcaatattagattaacggataggtacactgtgttatatattacctataatacataggtaatatatgtatcataagtaatatattatacatataatacatatattatatatacacctatgtatatattatatacatatataatattacatgcataaacatattgtgtaaaatatacatattatatattacatacatatatgtatatttatacatatatatgtatacattatgtttgtgtacacatatatgtatatattatatgtgtatattatatattatacataatatatgtattattgatatataacattatataacatgttatatataatattttttatttgtataaaatataatatgtagggtctaataagtttatgagatgttatatatgttatatataacatacataacatgttatatgttatatataatgttacatgttatatataatgttatatatctataacacatatatacatatataacattatatataaaatgtcatatgttatatatatctgtaatacacatataacataaaatatacaaatagtatatctgcattatatattatatacatatatacatatatgatattatatgtcatatttatttcatttttatatttttattatactctatttgtatattgtaaatatatattatacttatatttatttttattgttatattatttattgtatttatatattatatacatatgtatattatatatgtatataaaatatatataacacaatttacttttccatatatgtatgttataatatagtggtccccagctttttcagcaccagggacctgtttcatggaagacagcttttccatggacactgaaggtggaggcggatggtttggggatgaaactgtgccaaccctgatcatcagacactagttagatgctgataaagaacatgagacctagatccctcgcgggctcagttcacaatagcgttagcgctcctatgataatctaatgctgctgctgatctaacaggaggctgagctcaggcggtagtgcttgctcacccaccgcttacttcctgttgtggggccggttcttaacaggccatggtgctggtccatggccccggggcttggggactccaatataattgtgttatatttttcagccataaaaaaatgaagtactgatacatggtacagcttcaataacattatgttcaatgaaagaagtcagacataaaggtcacatattgtcattccgttcatatgagatatctggaataggtaaatccacagagacagaactcagattggcagttgccaggggcttgctggagggggaaatggggagtggctgcttaatgaacgtgggcttttattttggtgtgtgggaatgttttggagctacatggaggtgatggtcgtacaactctgtaaatgtactacatgacaccgaattgttcattttaaaatggttcattttatgctatgtgaaatatacctcaatcaattcatttaaaaaaaaaaaagaataacagccaggtttggggattgaacaatagggtagaaacaagtgccatccttggaggtggggaaggctgagggaaggtatgtttgggggaagctgaagagtttcagtgttggacatgtgacattgggatgcccttaggtatgaaaggagttcccagggaagtagttggatttggaatctcagagctcagataggagatcttagctgtagataagatatttacaactgcttatatataaaagcattttcgaagcaaggagaggaatgagaacaagcgagacagtagtgtaaaagaaaatccaatattaagttccagagaaagtcacatgaagaccaaccagcaagtgaggctctaaaagacagaggtgtagaggaaccttgtgggaagacagtggtgcaggtatcatggcagtgaggaggagagagtgctttaaagaagagaggtcagctgtgtgtgctgatgcagagagacagagactagaagataacagctccaagtgtccatatgtgacaacatggaggtcccaggggctgagaatggcaacaaggaacagaagccagcctctaccagctaacaaaagagagtgggacatgggttcatatctttgcagggaaatggacaaagctggaagccatcatcctcagcaaactaacgcaggaacaaaaacccagacattgcatgttcttactcataagtgggaactgaacaatgagaacacgtggacacagagaggggaacatcacacactggggactgttggggggtggggggcaagaggacggaaagcattaggacaaatacctaatgcatgcggggcttaaaacctagatgacgggttgacaggtgcagcaaaccactatggtacatgtatacctatgtaacaaacttgcatgttctgcgcatttatcccagaacttaaagtaaaatttaaaaaaaagaaaaagttttctttaaaagagggcgggaagtaaaagtatgaagaaagcacggcagacaattctcttgtaagctttggtaagcttccactcctttttagggaatttaaaaaataagaaaatgattgggggaagacgtgaggtcaaaaatgtcccagttaaaagatgggagatattaaacttatttagaaactaggccgggtgtggtggctcacgcctgtaatcccagcaatttgggaggccgaggtgggaggatcacctgaggtcaagagttcgagaccaacctggccagcatggtaaaaaccctgtctctaataaaaacacaaaattagccgggagtggtggcatgcacctgtaactccagttacttgggagactgagacaggagaatcacttgaaccagggaggcggaggttgcagtgagccaagatcgcgccattgcactccaacctgggcaaaaagagtgaaactccatctcaaaaaaaaaaaaaagggaaagaaaaagaaagaaagaaactaatctggaccatggagctgggaaatgcaggagaggggagctaagtgaatgtgaacagagtccttgagacgttttgaggggagggagccagggaactacagggaggggaagaaaagagacaggaagggttacccgagcagggagctttctagaggactggagggaggaaggtgaaggcatttgtgacctgtggctttcatctcttcaatgaaggacaaaacaaggtcacccgcttgtgtaggccagtgtagcccaggtggtttgaggagggcggacaagacatgagccggaaatgaagagagccggcaagcgtgatggcgacagaaacagctgcattctattggcgactttcttttgatatgtcctctatcataggtgatctccaccataaccccagaaagtggaaggagaaaggaggcagctctggggggtggggaggacagaagaccacacccttcacttccttcaagtctttgttcaaatgccactttttcaatgaagttcatgttgaccactcaattttaatttgcacaccatcacactgcactctagctcctagtccctcccaccctgcctcttttaaatagcacttacaccttccaatatgctgtgtaatttatcatttagcttgctgatgtatcccaagtgcttgaacatggtaggtactcaataaatagctgctgaagaatgaataaatggacaaatgaatgaagtagcttctttaagttctctgagagcttctatctttgttacttttatctggtgggtgtcagtctaatcatgaaggaggtcccaaaactctttctgaccacacagccctatcagtgtaaaatttggccatgtccccccaaaatttggccatgggtatttattcatacacaaataatttggtcatattttatttggttaattacatatgttgttactgtataataatacatcacgtgtatttttacctgaaagttttttaattgaacataaagtaaaaataactaatagattgtttttctttgtataccaaagtggagcagcttcttgtagacataagacactaccctaaataataactgagtatgtatgatgtgataagcacattcacatatgacagcacaatagccgccccccacccctccaccacccatatctttactaggtctatttgtattcccacttagtggctgagaaaaccgaggcttacataaatgaaataacttggtctgtgtcccagttagtaagtggcagagccagaattaaaaacttaggggtgtctgaccccaaaactcatgtgcttcagatgtgggacagagactccacccttgagtcaattatagttaaagggagaaaaagtgagaataaactcaccatctcacccttgtggacacaccctgcaatgcgtccccaagctccgcattctggaacaagccatttgtccagtccagagactacattaataccctgcagaaccaggggcgcttacatgggtcctccgtgcccatggaggcaccagaacctaaaaatgttcaagaaatggacagcagaagatatcaaaataacaatgaattgtgccaaactcatctatttccaaggtgaccttatgtcccagtttgacagggacagcccccatttaattatcaatacacaccctttcactctcaaaattatcactcccaaaaatgtcccagtttggatgataaattatatggccaccccatctacaccctggctcagcgcacaccagtctgagcccaagggccgctctgattagaactgaaaatgcagtgatttctcatatccagggacacttctcaccattgcccccagaggtcaaagcagcaggttccccattagcagtggctgaccccaagcaacctgcatggaattcacacccggagccctggaccatctgggccacccagactccttttccataaatcaccccacgtcggccacccagcctggccgccagcttcactcgggtctcacctcaatagagaaacatcatcactgacattaacggaaggtttgccaggggctccactgctcaggtgatcaggggcttgtgttcatcagactcgcttgacaaagaactgggcagccagacacctgctttggagtcctatggctgccaccacaccttggagaggataaggaaaacagggcatccaggcagccagaattgggaccactcaggacagaaccccaaggcacgtggagctgccctggcaattgtcaggggtctccagcgtccctcctgatgctcctccccagcccatgtggtcctcacaggccagccctcccctccccttgcctgagcaacaaagcccaggcaacaagagatatctcctggaagatagcttgaccatcttgctcctgggtaaggaataggtgctagaatttcacccaggtgggccagacagaccacctggtccacagcaagccactccagcccacactggccacagctgaaaatcactcactatcagaaacatcccctgagtcgcttgtgtaaattaccagccctaagaaactcaaggtcaatgtcccagggcttcttattttctctgcctcctggctgtggtctctttccctgagaaaatctggggagttgcagggcacctaaagggatttttgtcgctttctcagtttgattttgttggggggaagcccagaggcccgtgtgatatgccaccaatctaccaaaagttgacatccaccttgaagcacaagacccaaggggaaaaaaaaaaaaactgatccaagatcaaacgttgtagggcatggtaatttttgaagttctaagaaacatttacattattgtattttttaaaccctggtctttgttctttgggttgctagtttcctccccgccgacccccattcccacctggcagactggaaggcaagggacccagggggtaccttgactctgccactaattggtcatgaggctgcgggcaaggctgctcccttccttggcctcagtttctccaggcacactcagcctaggggtctggatcactctgtgagcctggcagggcctgcccagtgaagagcgggtctggcttccagcaggggtctgcctcctagtcccagctggatttgactcggtgcccctgggagggtgaggatggaggcatcttctccaggctccttagcagcacagaaaaggcatgcaaacctttccgctgtggtcagagacagcgagctcactgctggacagaccccagggactccagaatcaagacttcgtagaattgggcttgatggtcttaaagggaaatgtcaggcccagatgggatgctgagtttatctgctggggtcccggcctcctgctcactggttccttcctgtgcctccgagagaagatctccaatggcagctgctgtgtctccactgggcagcatcagagtaaacagcaggttctgggtcaggcacatcctccaggaaaaccactggcttccccactggccttgatggagggaccctgtgcccacagcactcccgcccagaccaggcatctgaaagacagggaacctgcactgaacctgtcctaggaggcagctcccaggtagggagagtttgcccacaggcagagtgaggacatggcagccagggagcctcaggacactggctttggacaccctagactgtggcatccttgagagctggaatcagctcactctgcagccatccctccaacccccaagtcccaacacagagctatgggaattcccctcactgatttttgttttccaaatgctgtggctaccatgtgggtccaaagggagccccatatctgtggtcggaattgtcaaaagctagtgatggcgtggctggattttctcccagactagggtgagaaataaaaagaagggaaatgggaaggttagccattggttcttccaagagaggacttgaggcttgcgattcaccattttaaataaaataaatccattttatttctcagaagcagccccttcatcctcagcagttcagtccaaggactagatggtgtgcaggggtggagggtaagggcagcagacaccagatttggggttcccaggagcgactggccagcagccactgcccagtcctggctgacactgactgcagcgccagccacgctgggcacctcactcccctgaagcgtgccctggcacaagcctccacaaagcactgagttgtaagagactccagcaggcatgtaccccaagagatgatgagaattcgactcagagagactaagacacctaaaaagactcaaccccacattcattaccagacaccttctgcaagcattcatcatttcttctctccagaagtttatggacatggaagcaatacattgaaaccatttcttaatgtcaaacaataatagcaggtactgatctatccaataagatggaaagattatttccattcagttaattagaaaactttacaactaacattcactggatgctaactatcagtcaggcatgttctaagtacttttcatgatcattgcagataaaactcataacacccataggtagtaaatttcactatcaagttcgttttgcgaatgaacttgaggttgaggatcgggcccagagaggttaagaaactcgctcaagatcacacagttcataagtggtagaaatttgaacccaagatgtcagattcagcctctacttaacgatgctttacacaaagaccagagattgaaaattgtgtccaagccacatagctgctatgctgagaggtgcagactgagctgcaggctctcaggctttcagcctgatggatgagtacagtattcacagtgcattctggacacaggagcccttgggaggtggtacatcgtgaggatcctgctgtgctgcagcctcaaaggcaggatgcgtgcctgccagtctcagtccctgcaacattctccaccgttagatgattctgaggctttgtagagtccagagtgaggagcccccaggactgacactggtgaccaccacctgagaaaatggagcccatccacactgccttccttcctcgcaggccagaccaacctcttgtgcaaaaccggtcttgtgtctttccctccctctctcctctctctctccctcccaatccctcaacccagaacacaggctgcatctacactcatccctcacaccttcacggggaccacaagacatgaatcacttctctctgtcaaggttatattttcttgttttaaaaagagcacctattcttcttattattctgaggattaaaaaaaaagtggcatctttttttggctgagaaggtggctgaatttttcaatatattcatgcaaacgagatatttcatctcatggattttatcccagttctgtctatgcacattttaaataaattaagatgaaataaatccattttattatattacccagtgccatctccatgaaataatgcccatatttgtatttcctaaggaatgttgacgtggctaaaaatgtttcagcaagtgtaatctttgaggattgtactgccagaaaaaaaataaacctaggcctttgtttagagcccggagtggcaccacttttgattgaaatggcttgaaatatccaaccccaaaacatggacaaggcagtaaagtacacagaattgatcacccttggctcagaaacaaaagtgctatgccttcctttgttttcttaacatctgttctctccctcccagcataaaccaccccacagaaataaattacacagcctcccttttttgggagaagagaaacggggatttgcagtggccagacctgaggtgcccagggcagactagccaaactctccttgctccctgggtggccgctgcagagactccagactatgtgctcctagcaggtgctactgctgaccttgaaaaccccagcatctccactttccacttccctcaagagatggaagaaacaacatgaaccctgggagaagaagctctgtggcatcttgttttcctttaaaaggcaggtggaccagtgctggtgacacctgcaaagttaacactgcagcccaccagccatcaaaatcaagaagagctaaggaaagtagaaccaaggtgtggcttaaatcactcatttgcccctttcatgcaggagataaactaggctcacaaagaatggatggaagtgaatgataggccaatctgtcaacaagagccaaatcctggggctgtggtttttgtagaaccccaggtataagttgggggtaaaatatatatgtatatatcatgttgtgggagggcaactactggcttcaatctaaagccctggacccctctctcctgctcacacatcctccacatccccttccctaccattccctggcacttctcactctccaccttgagttacacttaacatatgttggctggatggacagacagacggactactcaattacacccagcccagccctttctaaacaaccacccagctgttgcaaacagtggcaataactgctgggtctgtgtacaaacagcaggggaccacctgggatgcatgagccctcaaggccaaagccagcatctccacaagcctgagcatcacagctaaggaacctggctctttttgtggctgtgcttggagatatgattcacatactttctggccaaaaatgagatgcctcatcatctgagatgctgcgaggttccccagcaagaactcaacacaaatgtacaacagcctcccggtagaatagcctatttcccatctccaggacgggcaagggctttcacttgccagagagtcaccagcagcttggaaagacacttccgaccgtacagaaaggggttccctttgaatggcagagattgtatcaggtgctaataggacgaagtgacccccagaccccctcctgtgtgcatccttaaatgtcctaatgaggcggcagccctccttccattaaatgtaaggagatccagacttcctttcccaggccttcatcagggccagttatggaacactcatgaggcctcgtagcaaaatccccaaccttctgcagctcgcacagccaagtgctattctaggctggctcctcctccctccaccgctattagtgtcaattaggttcggcatgacaggccacctttgacaaaatgctggagcaacaaagacataaacaacgccaaagcctttggagttgatgtatggttgcatttaataaacatttgtttgcatattttttatcatgctaatgaatataattactttaatttatgtcatcaagctatgattctgttctgatctatacgtcacttaaatgtgtagcgttagcattttgcacacactggcaatttaagaagggaaaagattcgcccctcctgtgagaacttggagcaacattccagagttgcgcacgcccttgaaaaagctaaaccgagctctgcagctgggacccccatcctcgcacccctgcaaggataggtacgccttccacggcctgacagaccttttccaaagagcacacatttttatttctctgtaatctccccaaaagaggccactgaatacttgcccacagcataatgctaaacacagccatgaaaaaaaaagagttaaaatcgtattaatgggttttactgattataaaagtaaagcaagtttattttagagaatttgagaaaacacagatcacaggaagagactaggtgaagatgataagctaaacttctactctcaaaatcctttgaaatcaaatatatatatttatattaatatattttatatagataagaggatatataatatatatttacgtaaatatatatttcagctatatataaatatacatttaggagaatatatattatatatgtaaaatatatatttagaagaatatatatgcatattagtctaaactgcactagaatacaggaagggttattcttggtagaacagactcatgataagcaaaacatacattcagaaaagaagcacaagaaatgttacaaggtgcaccaagaatgtgccaagcttggatggggcacccccggagcacctgcagtgcactggttgagcaactattgcaggagaactgaggtgggttacccctaaccattgcctttccatggccagcatgttaagcagcgttatggacaggcactggcctgtggtagagacattgtttatgagtacctgctccatagagacagggcagtgcccagatgatctgagccttcactcagaatgggccagctccctgacccctaatacatgagggcaagctatagaaaaagattaaaaattaactgagttggctaagactcctgtctcccacccagagtcactgtgcaacgcccatgccccagaggcactagcaaggggagtcatgtcacagcatgttgctctacaccaataagacatctccttccccataaggccttaatttctcccttccactcagacataccatgaagccacaaggccactggcaaggagatcctgacataacaaccatatggtccaggaagctctctccatcccccactggcaagggggggaacccatcacacaagcagacagcctgggaagtgcgctctgtctatcagagacccttccccagtaaggtttaccagatggctcagcctggggaagcttcttcttcccattcaagcaccagcagggaccagcgaaagcctcagtcacaggagataaaccaagcagaccaaaataacaccacataggctctgaaaattagactgtcattggaaccatagcctttaaaagtaggccagggcctgcatgccaaatctaaacagggtgactgcctgctaaaatgaaagatttaaataggaaccagagtctcctaaaataacatccaaaatgttaaggatacaatcgaaagtcacccatcgtaccaagaaccagcaaaaacacaagttgagtgaaaaaagacaattcatagatgccaacactgagatgagtcagatgttaaaattaactgacaagggttttaaaagtaagtatcataaaagtggttcaacaagcaattacatgttatcttgcaacaaatgaaatattttaaaaatcagtaaaattcagtaaggaaacataacttattaaaaataactaaattatagaattgaaaaattccgtaatagaaatagaaaactgctagataggcttaatactgaatggaggcaacagaaaataaaattggtgaacctgagaatagaccatgaaattcatccattctgaaaaatgtagaacatagactgaaaaaaacaaacagacctgtggataataacaaaaggtgcaacattggcattattgtagtcctagagaatgagaaaaagagtgaggctgaaagagcattcaaagaaataggctgaaaacttcccagattagtcaaaagatataaacccacagattcaaaaaggtagcaaacaccaaataatataaaatcaaaaaagtcatgccaagacacatcataattaaaactgaaaactgaagacaaacaagagtcttgagagcagctagagaaacctacacattaccaaagaaaacaccaaattgaatgacagaagatttcacacctgaaaccatggagtccagaaggaagtagcagtacatttctcaagtgctgaaagaaaaaaaactgtgaactggaaattctatacccaacaaaactatcctttgggaatgaaggagaggtaaattctcagatgaagaaaaactgaaagaacttatcactagcagacctattcataaagtacagctgaacaaagttcttcaactagaaaggaaacaataataaaagagatctcagatattcaggaaggaagaaagaactatggaaagactagaaatgtgaataaacacaatagactctccttctcctaatgagtcttctaaatcacatgtgatgattgaaacaaaaactattgacaccatctgccatacaagatgatatttaaaagtggaaatattttttaattattttaatttttaatttttttatttcaataggtttttgggggaacaggtggtgtttgattacatgaataagttcttcagtggtgatttctgagactttggtgcacccatcagccaagcagagtacactatacccgaggtgtagtccgtcaccatcctcaccctttcccctgagtctccaaagtccaatgtattattcttatacctttgcatcctcatagcttagcccccacatatgagtgagaacatataatgtttagttttccattcctgacttagttcgcttagaataatagtctccagttccatccaggttgctgcaaatgccatcattttgttcctttttatggctgagtagtattaaatggcatatacataccatagtttctttaaccactcattgattgatgggcatttgggctggttccctatttttgcaattgcaaattgtgctgctataaacgtgtgtgcaagtatcttgtttgtataatgacttcctttcttctgggtagatacctagtagtgggattgctagatcaaatggtagatcaacttttagttctttaatgaatctccatactgttttccatagtggttgcactagtttacattccaaccaacagtgcaaaagtgttctcttttcaccacatccatgccaacatttaatattttatttttttgattatggccattcttgcaggagtgaggtggtatagcattgtggtttcaattagcatttaaaagtggaaatatttttttaaagggaggacctaaatgtaattaaagtttccacactttactcaaagttgcaaaatgttattagttgccattttgatattgtgatatctgcagcaacaactaagaaaactacacaaaattatataccccaaaacactacaaataattcagcataaaattcttaaaaatattcaagtaacctatagaaaggcaagaatggagaaatagaggaaatagaaaacaaaataaaataaaatgtcaggctcaagaccaaacatatcaatagttaccttaaaggtaagtagcctaaatatactaattaaatgagattagaagagtaaatttaaaaatcacaacccacctagaagctgtttataagtaattcacttcaaattcaacaacataagtatgttgaaaataaaataggaaaagttatatatcataaagacattaatttctaagacgaaaaaatgcttatattaatagccaaaagagtgaacttcagaccaagaaaaattactgtagacagaaagacattacacaattgacaaaagtgccaatccaccaggaagacaaaacaatcatagatgggtacacaccaaataacaaaggttcaaacatatgaaacaaaaaatgacagagctagctgggcatagtggctcacacctgtaatcctagcactttgggaggccaaggcaggtggatcccctgaggtcaggagttcaagaccagcttggccaacatggtgaaactccatctctactaaaaatgcaaaaattagctgggcatggtggcatgctcctgtagtctcagctactcaggaggctgaggcaggagaatctcttgaacccaggaggcagaggttgcagtgagctaagatcatgccactacactccagcctgggtgacagagagagaccccatctcaagaaaaaaaaaaatagagcttaaaagagaaatagataaatccataattataattggggacttgagaccctcagcatctgacagaactactgaacagaaaatcagcaaggatagaaatgatttgcaaaatacaaccaaccaccaggatctcattggcatatatttaatactccaccaaaacaacagaagaatatacatttttttccaagggcctatagaaaattcaccaaaataaaccaaattgtgagccataaaataaaccccaacaaatataaaagaatttaaattatccaaagtatgccttctgactacagcaaaatcaaactagaaatcagaaaaggaagagaaaaggaagatgaaagaaagacaacaagaaaatgtctaagcacttggaaattaaataacatacttccaagtaattcatcggtcaatgaggaagcctcaaaggacacggaaattttaaaagatagaactgaatacaaacaaaaatacaacatataaaaataaatgggatgcagctaaagcagtccttagggaaaatttatagcactagattcacacattaaaacagaggaaatgtctcaaatcaataatctgagcaaaataaacccccaaaaagcagaggaaggaaataataaatatcagagcagacatcaatgaaaatgaaaatgggaaaacatacttaatgacaaaagactgagtactttccctctaggggcagaattaaggcaaggttgttgcctgtaccacctttactgagcacagtaaacgggagttctagccactgaacaagtaaatgagaagaaacaaaagacatatatattggaaaggaacaaataaagccatccctaataataatttaaattcttttatgtttgttggggtttgctttatgacctatgatttggtttattttggtgaattttccataggcccttgaaaaaaatttgtattctgctgttgtttgggtgaagtattatatacatgccaatgagatcctgacagttgattgtgtttttcagagaaaaatcaaagaaacaaaaagctatttctttgaaaaaattaataaattttagcaagagtgtcaaatataaaatgagaaaaacacaacttatgagtatcagggataaagaaggaatattcctatagatcttggaaacatcaaaaaataatatgagaatactacaaacatttccttcaacagctgaggaaaaaaagtgggccaatttctcaaaaaacgcaaactagcaaaattcagttaaatcaaatatataatgtgactagatctaaccattacagaattgaattcatactttaaaatctgccctccttaaaaaaaaagaaagaaagaaagaaatctccaggcccagatggctttactggagaatcctatcaaacatttaaaaattaacatcaataacaccaattttacacaaactactccagaaaacagaagaagagagaacatttctcaacttattttatgagtcctgtattactctgatatcaaaatcatataaaaaaattttaaagaaaattgcagactattagctgtcatgaacttagatgcaaaaactctcaacaaaatattagcaaatcaaatctgacaatctattaaaataattatatgccataaccaaatgggatttatcccaggtatgcaaggctggttcaatattcaaaaatcagtcaatgtaatacatcatatcaacactctaagaagtttaatcatatgatcagatcaattgacaactcaaaagcatttgacaaaacctaatacccactcaggataaaaattctcagaaagttaggaatggaagggaactacatccacttgataaagagcatctacaaaaccactacagccaacattatacttaatgacaaaagactgaatactttccctctagggccaggatcaaagcaaggttgttgcctgtaccacttttattgagcacagtcagcagttctagccactgtaatgagtaaatgagaagaaataaaagacatacatattgaaaaagaagaaataaaaccatccctacttgaaaatgacataattatctacatagaaaataccaagggacttacaaaaacattcctagaatgaataagtaaggttagcaaggccacaggatgaaaaagcaacacaaaaatcaactgcatttttatatattaacaatgaggctgggcgtggtggctcagacctgtaatcccagcactgtgggaggccgaggcgggcctcttgaggtcaggactttgagacaggcctggccaacatggcgaaatcccgtctctacaaaatacaaaataattagccgagtgtggtggtgggtgcctgtaatcccagctgctcaggaggctggggcaggagaattgcttgaacccagggggcggaggttgcagtgagctgagattgcactgcactccagcctgggtgacagagcaagactctgccaaaaaaaaaagcaaacgaacaaaaacaatcaatatgtagaaatccaaattaaggccacaataacatttataatcactccagggaaaatgatacaatgaaaaactatagttttacaagatgttactattgtataaagggcacatgggaacactgttgtttcctacaactgcacatgaatctacaattatctcaaaataaagtttttaaaaggcacagccctttggaaaacattttgacacattattataaagttaaagcatatacttaccatttgaccaagcaattccacttctaggtatttacccaagagaaatgaagacgtatgtccacatttaaaaatctacatgcaattatttgtaatcaccaaaactggaaacaactcaaacgtctatcaactggtgaatagattaacaaactgtatacattcatacaatagaattctacttaacagtaaaaaaattattgattattgatacatgtaacaacacagatggattgtgtgattttcaaaaaccgcagaaaaaaggcctttaggttgaaaggattcgtaaatattaagcagaaagacagaacaaaattgaaatgagagttacctcctctgcaaaagtcagagtgccaagaaaaagatagaaccctaaaaacttccagaaaaaaaatgttacctgcaaaagaaaaaggatcatgttgtcacctgacttttttgagcaaggatcatattggcacctgacttttttgaacatatcataacatttttgagatagaattatattaaatttacatttctgtaccaagccaaaacatcagtcaagctttagggtaaaacaaactaaaataataattcaagagtattaggagataataaaccatagtgcacaaagaaatcagtaaaatttatagttgggtctaattcattaattgactgaaagaaagttaaacaaactgggaataaaatctctactgataatgataccagaggtgtgggatacaggttgagaaggagtaggaagtaaatagtagggagaagatattaattttagacattaaaagaaaatattattaagattttcagagtaaatacaaacaatttttttgagatggggtcttgctgtgtcacccacgctggagtgcagtggcacaattatagcacactgcagccctgaactcctgggttcaagcaacctcctgcctcagcctcctgggtagctgggattgcaagtgcaagccaccatgcctacctaaatttttagaaattttctgtagggataaggtctcactatgttgcccaggctagtctcaaactcctggcctcaagctgtcttcccatctcagcctcccaaagtgctgagattacaggcttgagccaatgcatccagcacaaacaaactttaaaaaggtgttttaactgccaaaccactggaagaaaaacatggatgtgaatatatagaaaaagctctagaaggacacacactaaactgacaacatgaattcctataaagagtatgggggaggggatatggggttggtctgagggacttcagccgtatctgtagcattttagcatctacaagaatgtattcattcttgtacagattgtgcagatttgaacaatccttactttaattgtcaaagacagaaaaaatatctggaaggccaaggtgggtggatcacttgaggtcaggagttcaagacctgcctgaccaatatggtgaaaccctgtctgtactaaaaatgcaaaaacaattagccgggcgtggtggtgggtgcctgtaatctcagctacttgggaggtcgaggcaggagaattgctagaacctgggaggcagaggtttcagtgagccaagatcacaccattgcactccagtctgggcaacaagagtgaaactccgtctaatatatacatatatattatatatgtatattttatatatataatcaatactagaggaaatttgaggaagaagacaattttactcagtataaagtgggatatagtttgtgaaagttttgcaataagtattaaatgtgggccaggtaccaacatttaatacttatttagtagtacaacataatacttatttagtagtacaacacactaaatattcattgtaatatttaactaaataaaatcaagtactgagagaatgataaatgtcatcagtgcccaaaaaatgatcagctttacaatagtagtgcatttttatctagttttatttacaaatatatctagacatagagatgtaaaacagaaagatacaaagagacttggggctagctttattcacaaaatagggatttcttgtgcttttttcttactaatttgaaactatatttattagagttttgtagtctgtttgttctcgcacacactcataacctatttgcataccagtaaatagtcttcaaaagtatcattcttaatggctgaataatatctcatactttatatgcaccgtaataatttattatatggagatttaagtaatttccaatttttgtctaatttaaataaaatcacagtgaacatcattatacatacatatgtgtggacatctgtgattctttaagtaatttcttaaaattgaactgctggtccaaaaaatgtactcatttttaagactttgttttgagacaggatctcactctctcacccaggctggagtgcagtgatgtgatcatagctgactgcagcctcaacctcccaagttcaagcaatcctcccacctcaccctcccaagtagctgagactatagcttgcgccatcacactctgctaatttttgtatttttttgtagagagagggtttccacatgttgcccaggctggtctgaaacttctgggctgaagcgatccatccaccttggcctctgcaagtgctgggattacatgtgtgagctaccacagtgcccggccaacatttaacacttattgcaaaactttcacaaaatatatcccagtttatactgaataaaatcttcttcttcaaacttcctctagcattgattaataatttttctgtctttgataatcaaagtaaggattgttcaaatctgcctatctttgataactactgaagtttagccatctttgaatgtttttatcgtccacctatatttctaatgttagtaattgtctgttcattctgtttgataattggtttttatttcttattaatctgtaaaagctattattaagaaatgtcatcaaccatttgttgtgtatattttaaacaattttcacaatttagtttccctttaatttcatttgtgatgtcatttgaaaaacaatttctatttttatgtccatttttcccctttggttctctgcctttgacgtcatgttacaaaggctgatctcactatcgcatcgacatttttctgattcctactcttttgtggtttcattttttaaacttgaatctttattacacctgtgacgatctaactttatgataaggttcttttttccaaatgatgagatggttgtcccaacaccatttctactttccccactgacttttactaaattccacttaacttctcaaaaagtatttgactatatctttattgcaaaagtcatactatacagacaatgcaaaaattctccttgacaaaagcctcattccatttctaattgcattctcttatcagaactaactgtaaatcagtttgatgtgtggaaatccagaggtttcttcatagtaaaaataactggcatttaggagggcttaccacatgtgcggccgtgccttaaggcatgtgtcaacttgtgtgatcttcccaacagcctaccaagtaggcacaacagctatctccattttaccattttacagaacaggaaactgagacacagagggtacagaactgagaaacctgctcagggatgcccagatggcagaatggggattcaaattcaggaatctagcttcaggatcggcagaatgttgactgatgtcctgctatctcctaatacacctacttgcacttcagtgaaaaacacatggcactattttcttttaaaatgaaagtttgaggctgggtgcagtggctcacacctgtaatcacagcactttggaacaccgaggcaggaggaatgtgtcccaccccttgcatgagcccaggagtttgaggtcgcagtgagccacaattgtgctattgcactccagcctgggcaaacagaaggagatcctgtctctaatgaatgaatgtctgaattaatgaataaatacataaagaaaaataaagttgggtctatggatttgatatcatactatccaaattatgctatagcctttttgatcaaatatcaatatctcttggttgtctttccatatgaattcatataaatcaatttcagtttttttaaactacgatacactatgatttactacagtttacgtaactcttctattagagtatagttaggttgtttctagcctttcaccatcagtaaggctgcaaagaacatctctagcatgactccctgtacatttttgtgaaagtttctcttgtttctcttttgttttttctcagtcatgtagtatgtgatttttttgtttgtttgtttgttgttgtttttgtttttgttttttttgagacaaggtctggctctgtcacctaggctggataggctggagtacagtggtgcaatcacgacacagcacactgcagtttctatcttctgggctcaagcaattctcctacctcagtctctcaagtagctgagcctacaggtaagcatcaccttgcctgcctgtcttttttatcttttgtagagacaagatctcactatgttgcccaggctggtctccaactccagagctcaagcaatcctcccaaagtgctgggattacaggcatgagccacacacccagcttgcatttttaaatttaacaaatactgccaaattgccctcccaactatctgaaccaatttataccccataagcaaaatatgatagtacttgtttctttataacatcccaacagttgatactatcaaacttattttcaatataatgagtgaaaaatgatacctccttgtgcattatttgggatgttcctcactactggtgaagttgagcaactttttatgcttattttccattttggttccccttttattcgttgcctgtttgtatatttttattatttcccctttgaattaatgatcttcttcttattgatttataaatgtttacatatattttggatgctaatcctttgtctattgcaaatgtaaatattttccaccagcatgtgttcttttaattttgtttatggtgtcttttcttgtttatagaaacttgtgtcatagagaagcttttaattttatttgggcaaacatcatattttcttttgtggtttatatgctatattttctttcgctcagtttgcaggttttatttttgtataacatttagctctttaatccatctggaatttactttggtgactagtgtaatgttaaaaatataattttgtttttacaaatagtatctaattttccacacaatttattctttcccttactaatatgaaatgccgatttttcccaaaattttatgtatatctatagggatctgtttctggactcattacgttgttctagttaaatttttagcttcaataccattctacgtcaattaatatagctttaaaatatatatattgatatttagtaaggtaggtgcacctcttgtttttcttctaaattatctttgtccttcttatgcatttactgtttcatatgaattctataatcagctagtcaagttccatataaatgctgttggacatggaatttttacatgagtttggggaaaatatctatctttacaatattaagcactgttatccaaaattaaggtatatatctctacatattagtatctattatgctcctcataagctgaggtttcttcctagatattctatagttttcattgctatgcgtgaatagggtaattttgcgaattgggtaattttatctatgactttttctaataagataatactattgtattaaaaactattagtttttatgtgtttattttgtactgggccattttataatactttcttattagctttaatggtttctcaactgattatcttattcttcctagggagcttggctgaaaaaaacaaaatgacactataatctctttctccattattcacatgcctttttaattttttcttattgtatagcgttggcaaagacctccaatacaatattgaatatagaagtgataggaaactttgtcttgctggtgactgaaatggaaatagtcctcatggtttcaccactgctaagtttctagtagaaatctttactttgataatggaagttttcttatatatttcatgtgcaagaatttttgagtgcctggggaggcgtttgtttgcttatcatgaaagagtaaattggaaaaaaaatgttttcacttctgttatgattttaatctcagatttatacaaggcttctagaacgaattgagtaacttcccaatttataacataagaattatctatttcttaaaggtgttatagaatgaaatattaaaaccatctggtcttgatgttttccctaaatgtatatttgtaactagctttctaattttctcaatagaaatagcatatttagactttctattacttcttgagctaattttgaaaatcacgcatttcatctagttttttagttattagtacaaagacactatcttacaaaatttaattccttctctatctgtaattacatcttatctcctttctcatgctgtttatttatgctctcttttttccttaaacttgaagaagtttttattgaccaactctactagctttgttgttcttgtttattttattaatgtcattttatctttattaattcctctcttcaactttctggagatttgatttttttgttctttgtagtctcctgaatattatgcttggttcatttgatttcaattttgctcattttctgatgtatgcatttaagtccataaattttcctctgataactgctttggccacatctcagaggttttaatatttaatgctctattgcttatttctaaatagtttgtaatttccactttttatttccttattaacagaagactttttgtaagtgtttttatatttatgagagtggagatttatttaatttctcttttagttattttctcatttgttcagggaatggaacttacatatccctacttcttagaatttgctgagattttctttgtaatctaacatattatcaatttgtgtaagtgatttatgtgtgtgtcaaaagaatgtgtgctataagcttgttaatacaaagttgttcattgtgtcatttaaattctctgtcattatttttgtctatttgaaatattcatttcttagacaactatgaaatttgaccttctgtgattgcaggtttgtcagtttctctttatatttctattaatttttgcttacattttccaaagcaacattgtgaaggacacaaaggtttacaattatatcttcttggtggctgttatttttaatattatgaactattcctctatgtactctaatgtacgccctctgactttatatgactcataaatcatattataaatttttaaagcagttaggccttcatcttgactctgtttctttccattgatttaactgattattttggggtaaataccacacttttgtctattgtggctttataagttaatttttatctgatagttaaattattgattactctaacattattcactcttccacatttaggtttattttgcaaaaccaccaacagaatccaatttaaaatgttgagtgaagtgccagattcagtggcatatgcctgtagtcctagctactcaggaggctgagaagggaggactgcttgagctcaggagttcaagtccagcccgggcaacgtaaaaagatcctgcctctcaacaattttttaaatttgttttcaattattggaaaagaattacttacaaatcaacttaggggcatttctctttatgtagcactgaagtctacttatatgcacctcacaaaaaatgtatttccttcatatatgacgggtccacttcttaagttaggggatttttttttttttggtattttgtattttgtgtcttcaatataaatagagtatttttccttatcttttatctctaacctttattcccagcataatatgtgggacatgttttatttacatgtatctgttttattattagacatattactgaattcctttataaggcataggagtatttcagatgatgttcttcagatttttcatattatcataaaatagtaaaaattttgacttgaccatttccatatttattccccaattgtttttattttgactgtcatttttatcatatcattatctaagacttgttttgttaccataacaataattcctacaactttttgttttatttgtattttaagttctggggtacacgtgcaggacatgcaggtttgttacataggtaaacgtgtgccatggtggtttgctgcacctatcaaagtattaagcctggcatgcattagctatttttcctgatgctctccctgctccaccctcctgtgacaggtcccagtgtgtgttgttcccctccctgtgttctctttccccatcagtgatagactggataaagaacatgtggtacttatacaccatggaatactatgcagccataaaaaggaatgagatcatgtcctttgcagggacgtgcatgaagctggaagccattatcctcagcaaactaatgcaggaacagaaaatcaaacaccacatgttctcacttacaacttttttatttttaagtatttgtaggctgttgttttgagatagattatcatataaaaccaagaaggctcaacattagtacaatcaatatgcagggctggataattctttgctgggggagggagagccctttcctgaacattgtaggatatttaggagtaaccttaacctctacttacaacataccagtagcactacctccaagtcatgacaatcaaaaacgtttccaggtactgcctcctgagaggcaatgtccttgattgagaaacagtatgcaatgcattatccttctcttcctattttaatcacagcttttggcaggactgatgttgaattttatcgaatgtccttttggcatatgattacatatttctcccaggtacctattgatgtaataaatttttaattatatattttctgatttggtgccatccttacaatagaggagaaaggctttattagtcaagatttattatttttaatataaggttagtgttcattttttatgacttttacctatatgtttacatgtgaggttgacttgtaggttttgtttgtttgtgacgtttgttaggtttgagcacaaaaataatgcttgcttggtaagtagcatgatcactttttgttccttaagacatttaaatcaatttcctatacaaccatccattttaatgtatttttacattattcttttcttattcaactactctatagttaagtttagtaatttgtaccacaatgagataccatctcacaccagtcagaatggtgattattaaaaagtcaagaaacaacagatgctggcaagtctgtggagaaataggaatgttcttacactgttggtaggaatgtaaattagttcaaccattgtgaaagacagtgtggtgattcctcaaagacctagaaccagaaatgccatttgacccagcaatcccattactgggtcaaaggaatataaatcattttattataaagatacatgcacatgtatgttcattgcagcactattcacaatagcgaatgcatggaatcaacccaaatgcccatcaatgatagactgaataaagaaaatgtggtacatatacaccatggaatactacgcagtcacaaaaaggaatgagatcgtgtctttgcagggacatggatggagctgaaagccattatcctcagcaaactgcaaactaatgcaggaacagaaaaccaaacaccacatgttcttacttataagtagaagctgaacaatgagaacacgtggacacagggaggggaacaacacacactggggcctgtggggggtgggatgtggggagggaaagcatcaggttaaatagttaattcatgcagggcttaatacccaggtgatgggttgatctgtgcagcaaaccaccatggcacatgtttacctgtgtaacaaacctgcacatcctgcacatgtatcccagaacttataattaaattaaattttaaaaacttagtaatttgaaatttcctagaaagtcatttatttcaacaaaattttctatgataatatatctatattttctaccacttttaactttttggaatacatgtatattctccttttttatttctaatgtttttacatgtgttttctcactctgtttcacttaagtaacttgtcagatgtctttgacaaattctaattcttagacttggcaatgtactgtctgttttctgatttactaagttatgttgtatctttatcaatatctttctagtttatttcattgttgtctttctaattattgtgagctaaaagcttaattcatgcatttttattctacattcaataatgtgatatttaaggctatgtgttttcttctgaatatagctttgagcatacatcataaggttgatatatggtattctcattgtaattattttctaaatagtctccaaatatagttttgatgtcctctttgatctaaaagataattcagagcggtcttaataattttagaaattgcccatcaaaattgtagttacccttctttgttgattgtataaaataagggatctgcccactttttgattctttgactatatccaaccttttttatagccaatatatactatttagtgaatatttcataggctttaatatagtctctcatttagaaaaaaatctcgatttaagaaacaactttattatttgaaatcatctaaatccttggattccttgcctactagatctgccaaataccaaaagagatgtcttaaagtttttcattacaactgtgaatctctccacttcttcttgtactcctaacaatcttgcttgctacatcttactgcaatgctatttggcatattgggagccatgactagttcagtctactagcctgtaagcccagcaaagacaggaatcacatctgacttgcctaacgttgagtcccagcccctggcccaatatttactaaataattgtgggaatcaattgacaagtgatagagattcagtgttgagtatatgaccttcaacaaaaatactttactattatatctaatttttttaccctcaattctactttgtctgatgcctagatagacagatagacagacagacagatagatggaatttttggagataggattttgctctgttgtccaagctagagtacagcagcatgatcacagctcactgcagcctcaacctcctgggctcaatggatcctcccacctcaacctcctaagtagctgggaccacaagcatgcacctccatgcccggctaatttctttttgctttttatagagatggggtctcgctacattgtctaggctggtttggaattcctgggctcaagtgatcctcctgccttggcttcctaaagtgctaggattacaggcgtgagccactacgccttgtcaatgatgtcagtatttgtccctgtattttgctggtttgttttacttgacatatattatatatcttgttgttgggttttggtgggtttttctgtttttgtttttgttttgctttgcttttttgtgtttctttatctgctccatccttagttctatgaaatctattttctttgtgattgtcttcaatatacagagatacagtttagaattcaagtcataaatggtttcaagtgtttccaatgtattacttaacctctatatttaactcctatgtttttctaattttcaggtcagagaggcaattgaatcttttagttcttttttttaacacaatgtagttaatacatttttattctcctcttccagaccccatgctactatttcttttccaagtactcctcagacacttattaaataaactaggactttataggttgattattactaatttttacacaataggactttgaaagtgaatttttaacacttgaattcagtttttcaaataaagtctcaattttttttttttttttttttttgagacggagtctcgctttgtcgcccaggctggagtgcagtggcatgattttggctcactgcaagctctgcctaccgggttcacgctattctcctgcctcccgagtaactgggactagaggcgcccgccaccacgcccagctaattttttgtatttttagtacagacggggtttcaccgtgttacccaggatggtctcgacctcctggcctcgtgacccgcctgccttggcctcgcaaagtgctgggattacgggcgtgagccaccacatctggccctgaagtctcaattacttagacagcattttttaaaagtataagtgaggtttgtccttcttcttctaggcaaagctgcacctctcaccccctataccagacagtcctttgctatggacacacagggtggtaggacacacaggattctcataggcagttctggttctcctatggaccaagtagcaccagtgcccaaaggcagccctctgccaatggttgtaggtgaggaagctaagagcaaagcatccgttggaagctggtagaagccaggcttggtggctcacactgtaatcccagcactttgcgaggctgaaacaggaggattgcttgagccccagagtacaagaccagcctgggcagtgtaaagaaaccaccccctcccccgcccccataaaaaaattaaaaacatagctgggtgtggtgctgcacacctgtaattccagctactctggaggctgaggctggaggatcacttgaggccaggagcttgagaccaacatgggcaacatagcaagatcctgtctctacaaaaaatttaaaaatttttagctgggcatggtggtgcatacctgtagtcccagctactagagaggctgaagcaggaggatttcttgagcccaggagttcaaggatacagtgagctatgatcacaccactgcactccagcctgggtgacagagcaagaccctgtctcaaagagaagaagaaaaggaagaagaagaagaagaggaggaggaggaggaggaggaagaagaagaagaagaggaggaggaggaggaagaagaagaggaagaagaagaggaagaggaggaggaggaggaggaagaggaagaggaagaagcagctggtagaaaaattggagggtctggacagggcaccagggatgtctgctacaccagcacaccagtgcaagcagcaggcgggggcagtgtccccaaagaccccccactgggctaggcttgagctgcagctgcacctgctgcaggtgacatgctcagcctgcccttctcacctggccatcacacgtggacttactcccatcttcagactttgtgtcaattgcatctcagccaaggtttccattaatgggttattatattatatcacctgcaaaacagagaaaaggagggctgttctaaaattctaacgtgaaaagtgagcgtgtcaaatgcagaatgtgcagacacagtgaccatggagtttaccactttattaaaattgtgattgttcacataaagactcaaacaggtcacatattaataattatcactgacaatctttaacatcagccgaagcccacaagtgaagcaatattacatctcccggtctcatttatcttactgcttatggcccctctgtggtcagcacgctgtgagctttgtggacatttaattatgagcacatcataaatggagctgacagggcagaggctgcccagggatgctcctggcaagggggtcacggtggaaagtagttagttgatgcaccctcccgaacagggcgtggcagagactgcttctccacgtggccccgctaccgttccctgttgcccactgcagaggcagtaggccggaatgtgttcagttattgacagccctctaactttcagaagcgtcagcccagttgccttaaaacctaagaccagccccacagtctctcctgtcccgcttagctctgagagtcccttggcttgcctctctgtgtgtcttcggctgtttacagagctctctaaatgtgggcttcactctgatgcacatgaagagggtggactttcttcccataccccaggggtccagagatcccactgtcctctccagctgtccccagtgtcttctgtgcaaaccactcagctctaacaaggtgcaaaggacagtgagggccccaagaacatcctggcccctcacctcaatgcaggaaatacctttccactacagcaaaaaaaaaagggactctgcaacgcaagtggtggggtggggagggcttttttgttcgcttctaattagccaccgctctgatgtgatagccaaggcgtcacgcactaataaggccacgcgtgtccccgagtggacctgggagagcagcaggacttccccatgtcatgtttcaaagcaactgtcctcggagggccgaggtacggattcctccactgccccagcaggctcgatggggaagacaaagcgtataataaggggcgtgcgatgaaggggctccgaggagaaagctgaaaagtagctatcatgttggcagataaattctacacacaattattcattcctagcctcttgacatgtagattaatgagtttgataacccaggcttctaagaagtagattccactctgttcgcaggctttctccccctctacctacaaacagcacacaggtctatggagaaaaaaacaaatcgatacatttgcagtggccatcactgctttttgtggttggagccctacgtcaaaaatatgatgtgtcttctccttcctggcgtgggagaagccagtcatggccaggcggaccctggaggggactgtgggcttcagatcttggactccactaagtcctggactctttttagtgggctgggcatggagcatttccaactccagtcccgagggaaaagggccatttattgacagagcagctgtagcctgctattgtgccttaggttgaagtccctgctggcagagttccaggtcagcacccagacatcctcgccaagaaagagccatatggaggaaggaatgacgcaggagcaggacagtcacacctacacccacgccaggtatttcacttaggaccggtgaacagcaccaaactccaacccaagtgtaaggagttcaaatccttgaaaagagaaattgggttcactgcattcatcaagatgatttggggtttatgttacgattccatcacccccaacccacagtgatgcagattttggagatgtattttgattatccattcctttgactttttagccatttggcaacagcatttctagatctcagcctcattttatttccttttcatcacgttggtgtttatgttctaaagataaaacacgtgggggaggtggagagggtagaggggaaggcttcccacctgatatcctgctaggaggttttatggccaccctcctctgccaggcaagccctctgggaaacagagtagacctcaaaaacctagagtggggccaggcacggtggctcatgcctgtaattccagcactttgggaggccgaggcagatggatcacttgtggccagaagttcgagaccagcctggccaacatggtgagaccctgtctctactaaaaatacaaaaattagcctggcaagatggtgggcgcctgtaatcccagctactcaggaggctgagacaggagagtcacttgaacctgggaggcatagatttcagtgagccgagattgcaccactgcactccagcctgggtgacaaagactctgagaaaaaaaaaatccctagagggagtagagggagccctgtctgggtgctgggtgactgaataattcacctcccccagtcatcacagattcaatgtctgtgaaatctgtgtggctgctggaaataaggggtacagggagatcattcttcaagacaccttcttttatcctccagaaagagaaatgaatggagtggaaattcacccagctcacaaaagtccaatgaggtctttgattagcaacatggatcagttcaagcatttgaatttcaacacagcttccatgccaacttcaaaagagacagccctgagctacacaaagagggaaaagtctctttcccctattcgagtagtcttgaggagccaggcttctcacagagtcttggggtgaggatcgccaggtttagcaaataaaaattcaggatgcccacttacatttgaatttcagataaacagggaatcattttttagtataaatatgtcccaaatatgcatggaactaaaaagataatttaccatatactaaatactaagataatataccaaaaaatattttagtattcgtatgtcctatgcatatttgagacatatttatactaaaaaattattcaatatctgaaattcaaatttaagcagacatctagtatttcatctgacaaccctattcagggtgtccttgtaaaactgctcagggaagaaccagggtgtgaccaaggagaaaagagcaaaaacaggctcaaaattcaagacagccacacccaggggcctcttccatccctccatctggcctctccgaaaacatcctgcttccttctgagcccaaagctccaaccactgaaagaaaacttggaccattgttcctgagtagatgagaagcctccatctccggcttccagggctctgtatataagaccctaaactggagggtatggggctgggaggacaccaaggtagacctcaagaaaccagagcccatgggactgtccttgacagctgccttcctgctccccgaatacagaacctcctacctcaccacggcccagttgggctttttctagaagacagcggaggtttggaggtcctactctcccacctggcctggcagaaatcccagaacagaactacagaatgcaattggggcagggagtggggagaaaatccagcactgcttcctttttcaaatcaattatggccagactgactcatcttctctcatagaccagaaagtcccacatcttgttgtttcttaatcatatggaaacctaaatatagacatatctgcagaaggacaagctgagaaaaccagtatccttgttctcccaggggaaagctcgattctcactcttttctcctgggttttagttttgggactgtgttcccagtagtgcacagagcatgcgcctgttggggcaatggcagcaactcagacctacttccaggtctgctgctgcgcctgggtccccatcacataccgcttgatcttgcctctggaaagacctccatcttccatcccaccgtgagagcaatatgatgagaaggaagccaggcacctcagtcacatctcagcagagggcctttgtgaatggaaccctcactgatgtctggccttgagcagacacccaaggctgcaggctccagagatgatctcagcagaagagtcccactgagcaccaggccaggcatagtggagtcaatcaggcacccaggaggaagcaggacccctgcaatgctttgcgtcccagtccttcttcccttcactcatttctgggaaacagcacaaaggatggctttattgggaaatagcttattacccttctggaagggtcttgaggccccaagtttcagaaagctggggccacggagaaaatgtagctgtgctgcacagaacagagatgcaaatgagatagccaatcctatgatcctaacaaaagtcagtttgtccggaaaaagcattttagaggagatcaaagtcatgtcagagtagccacgaaaaagctttagcaaagcacagtggtcagatttagcaatgagaataatgagaccagggaagagcggccagtagcctgggattctttggtgcaacatgaatgaggacaaaatcaggatgtcattgacagccaaccaacagcccaggcttcatgcagcaggcaacctgggcagcaggacctggacttcaaggctaaaggagcgtctgtcagctaactctcctgctgtctccacgccatgcccaaagcacaatctaatatcttcctggcatccctagacaagaggtggaaacctggcagctcataagccacaatacagcccacaatcttgctcagttcaaacagtagtgggtaaatatttgaattaattgctaatattttaaaagcagatttgggactcggtgcagtggctcacgtctgtagtcccagtaccctgggaggctgaggtgggcagatcacttgaggtgaggagttcgggaccagcctggcctacatggtgaaaccccctctctattaaaatacaaaactagctaggtgtggtggctcatgcctgtagtcccagctacttgaggggctgaggcaggagaatcacttgaacctgggaggcagaggttgcagtgcaccgagattgtaccgctgcactccagcctgggcaacagagcgatactctctctcaaaaaaaaaaaaagaaaaaagaaaaaaaattagccaggcatggtggtgggcatctgtaatcccggctactcaggaggctgaggcaagagaattgcttgaacctgggaggcagaggttgcagtgaaccaagatcatgccactgcactccagcctgggcaagagatggagatttggtctcaaaaaaaaaaaaaagaaaaaatgaaaaaaatcagatttcgcaggaaaatccagatttcaggtttcttttgaaaaatcagaagatctgacaacactgggcctgtgtctgattgacaggagccaagggacagcctcccttagatacggcacatccttgccagttctccgcagtccccagcactccctattgcctaacctctgctccgtgggtcggtgcactgtgaaggccctgcccttggcaccaaaggaccacaacaggaacacaagcacctctaccctccccagaagccttttcccactggtcccctcccatctctcagaagaaccattattctaggcaccttccctcctataacttcaggtccccaagggcctgtgatctgccatctaccaccccaatagaggcatacgtgcataagacaaaaaccccagtgtcttggaaactgtctagaaaataatttaaataacagacatcgcagcatttttagaccaaaaaaaaaatgtaacaaagtcatgcccaaggcccagggttaaatgcaacccacatggcaagaatgacatgcccatttcacagactgtggcatcagaggtcaaagtcctatttcccctgactctattccctttaattttcaggatgaatggctcacccgtgggggtggaggggcaggaagtttcatcaatgtattaagtgttgaagggggaaaaagttctgatgggctgattcaggaattgggattctgggcagagctttacaaaaggataatgtatctttaagcctaggtgcccttcagggaatgtattggataaatgtcttctgaaaagcctgtaaatattccatcgcctcactgtcattactaccatgaaatgaaaatgaagcatgaaagaaatataattccatattcagatgacagcattagcctccataagcaaactgaaatatttattagtaaaatgttcagtatctacgcctgtaatctaaaaaaaggacaaaaatgttttataataaaaaagagattgaatgcagaggtaaaatctggttggctgattttattgcttattattaaatcctggcaaaacaattatttttttcttttcattagtaagacacccaaattaaaactctgccctccggctgcaaggtttacagtagtgattaaaaacaaggaattgtgatgcatggggcttttgacaatggcataatcaaattcattcatattgttcaatctttcactgacaaatatttttacagtgaaatataccaaacaaagaatcacatagaacaactatcaatacagagaaattaggaaaaccttgttattatttaaatagtgaactgataccacgttgtcataatcttgaatacaaacattatactgtagttaattagggtaattattgtctagattgtgcttaattgtcttatgctgaataggacgtatgaatgatgctttttgagctttctataatacctaagtgccgccaaactatttctttataatttaataggttttgatggtatttcctataagtcccaaaatacatctgaatacaagctaagagataaacatgaaccataggccttgacctctgtttcaccttattgaaaaggaggcgtaagagagtcatttagtataccagcgtcacagagcattcccgcaccctgagcacattccttaaaggaaagggaaaaggaaaaaaaaaaaaaaaaacagagtctttgaagtgaatgaaaaattagaaattcaagtgaccacgatcaattctgaaacactgcacaaaattaattacagtttggcatcagaagcaagaatgtagatttcagacagtcggtgtcatttatctcgagccgcacaatatacaaagcgattaaaagccaaatctgtccccacctcccaagtctaaggcctctcagaggctgtgaagtacaaatgattaactccaaattatgcgagggactgggcagccgcttcagcttgaatggagtgtgtggcaagtcgcagacgctggagaaggacagatttgcggctttttatcaaaatccagtctggccaaccattgacggactccagataaattacccagggatctgacagtggctgcagaaagctggctcggcaaaatccaaatctctaatttctatctgtttttaattgcttgccttaaatttgcatttggtttaaaggatttattctattctataggctactctgaccaaattgctttctatttcacatagagttgcaggaacctgtcttaggaggcggggaaagatgtggctttttaatcacttttaatatgcaagttcagtgtcttgaatacacctaggctagggagatcccctgccctctctaaatcctgggattagtccaagaagctatcagtgcccaggtgctactcagacgtcctcggcctctcctacccagaaaaaccccacagagaaacccagccataccctccttccttcatctggggccccattctcattagcccccgttagaaaaggcaggacatgcgtgtgttcaaaatacatcttattctgttgtcaaaactcactcagtattaaaaaggctgacagattttccctacaccaagaaaccacacatgcagtgtcacacacacacacacacacacacacacaagctgggtgcctgcttcatttaaccttgcatttgtaaccagtttattaacacgaggattgccaagtgaaaaactgtcattttaagatttgcaaattgagcctcacctcacaaacccttagattctgagcaattggcttcgggtttctgggtgaaaccagggctgccctcaccagctgtgattgactgagctgtacctgacttaacccaggttctctcccacctgcccctactgaatactctccaccctttcactggggatttcttaaacacagctggagatatcgcattgcagaagcttccctatggcccagtgcttcagctaagcaagtctatttatcccattggtctcagacacaaatggctactgatccagggaggttgcacaggacggagaaagactgagcttgaggaaggtccatctcccatttccctccatttcatggaaacagacatttcttcatttcctgcagcaaaaaaacaacgtaagcacaatagaaacagcaactgggctgggcgtagtggctcatgcctataatcccagcactttgggaggccaaagcaggtagatcacttgaggtcaggagttcgagaccagcctggccaacatggtgaaaccctgtctctactaaaatacaaaaattagccaggcatggtggtgggtgcctgtaaccccagctactagggaggctgaggcagaagaattgcttgaacccgggaggcagaggttgcagtgagctgagatcaaaccactgcactccagcctgggcaacagagcaacacactgtctcaaaaaaaaagaagcagcaactggccctctgcccagtgtcagagacactagggagtggtggggactgtggctaactttaaacgcctgatccttctgaaggaggcagctgcgtttctactcacatacatgttaccgtaacgaaaagaaggtccacgttgccagatactctgaattttcagcaaaatctggattctttccaaaaatttaaatgttgattcacattttaaaggcaaatagaagaacactctactgggcaaatataaacacttctgatggccacatccaatccggagcccccaatttatgacctcaggtccttatttttggtgattgtcattgtcaaatggctgcaaagagacatctcaggattccaaagggcagattacccccttcaacacttatgatagaagcatgccgtaacagcggtgcctgaattcctccttgtcttatgcttactgcccccaatggcctcatcttggagtgacccctggtgccataaccttgaacaacttaagggctttggtccagctcagggtctatctccatggcactttcagtctctggaagcagccttgactcacttttttttttaatccttggacttttagagaagttacacaaatgcctaaaaattgtgagtccaggatgtgcaggcaaaggccaggcatggtgactcacacctgtaatcccagcactttgggaggccaaagtgggtggatcacctgaggtcaggagctcgagaccagactggccaacatggtgaaaccccatctctactaaaaatacaaaaaattagccaggcatagtggcacatgcctgtaatcccagctactcgggaagctgaggcaggagaaacacttgaacctgggaggtggaggttgcagtgagccaagatcgcacgattgcactcctgcttgggcaacaaaggcgaaacccagtctcaaaaaaaaaaaaaaaaagatatgcaggcaagtttgctggtcccagcccaccctgctttctgcagctccaggctggatcatctccagctgagtgcaaacatcagcttccacccacacagtccccctgctcatgggtcctgggctgcatttttctccagaccgacttcccactgctgtgatcagctcagtggcatctattagagagagaaagatgtgctctgctactgtagggtaccctcaagctgcatcctgccaatgcccatcagtaagccttacagagcgaggaggaaagagagaaggcactacgctggggccccaaccaaatgcctccccaaagcaaccaataactcaccactgattactagccaaggaaacactcagctcccatactgtggcagctccctgtcttggctctcctgactgcaaatgccatgacagtgaccactgcatccctttatagcaccctgggcttgcactggattatttatgctgaggaagtgtggccaggtggagggtgcaatggatgtaaaatcagaagcgcgcagaggctgtagcacgttcagtaagtcataggaactcagagcttctgtttaagcatctagaaatagagtttatatcacccgccttacaggtgctagatgaagtttttttcttttagacaaggtttcactctagagtgccatggtatgatcatagctcattgcaacctcgaactcctggactgaaacaatcctcctgcctcagcttccctagtagctggaaccacaggtgctcactaccatagttggctaatttatttttgtttttagtagagacagtgtcttgctttgttgcccaggctggtctctaactcctgggctcaagcaatcctcctgtcagcctcccaaagtgctaggattaaaggtgtgagccaccgtgcctggctgatgctggaagaattaaatttgcagtttatatatgtcaaatcatcatgtaaacactatgaatgagtctcttttttcagggttatgtggctgctctgtgcacaatgcacagtgactggtgtcagccctgcgtctcaaaactcccaccccacggcagcaacatcttttgaaataaaattggtggaatattgtttctaggaaactcggtttataatagtttcaagatgcatttattcaaccatgggaaaaacataagaaaataagagtgcatggttcctaccctcaaggagcttccaatctatttgcaaggcagagatggtggtggaataaagtaggtagttgtagtgaggtccagacatctgaaaagttgagtcccacaggccaggccaaagtcataacctggtttgtcttccccagccctgagaaacagttttctgactgctcataccagaatcaaaacatacagaatttgaatccccctgaaaataaacactcaccttcctaaaaacagagacttgagcaggaggtctctcttgctatcacatcccaaggtgtggggaaaaaatgcaggtggttttcctgccctacagtgagtcccccaccagggtcaggaaatgagatgacatttgagaaagggtcttatcagccgtcatctttattccagcattgtcttcatcaaaagtattaaattcaataagctcaaagtattagagagaaaacagaagggttggctttgggcatctatgaagcagaaagcttcaggtttagcaacttaggaaattatctttgtaaaatatcagaactttgaggagttcaggcaatatttatcaatagcattttttcactctgcattcgtgattcgagctgcaagactccaccatgtgaagttagcagaatgtctgtcttgctgttctgaacacaaaattggagtcacagacattcacatcgacacctcgaaactaccactcctgagaggccaggatgccacaaatcaacctgaataaccaaatcctccgagagagcaaaaaacaaccttcccctgcctcagaagagaccagcgcccagttcaccctcttcagaaataccatttgtacttttcagaatcagaatgtgaccttacaatgaggaaacaaaggatcagagaggtgaaaccacttgcagaaagactcacagcaagttagcgaccaacctgagaccaggatgccaatctagggctccctctctgctcctgcaaggtaggggaactcctctattgactcttgaatatctccacgttcatagggggctgttggagaccttggagaaggacaagttcagctgtcctcaggcctgagagcagaacctgctcaattgtcattcctgagcttcccccatgagctcacgctacagatgggtgcacatcagaaccgcacatcagaggcatgcaaagtcatccactgaggctagcaggggtaaacacataaaaaatgttcacagggccttcaggaaggcacggatgaaacaaatctcaaattgcaggagaactttccaaagcataaccatccaaaggatgtggtgtgtacatggccatctcagaaaatttcaacagaaaaggaggtatcatttaaattagaagggggtacccaaagaaaatgttcacagggcatgtttcattgactctgtacttggcagtggaccttagagagactctgacaataacaatgcacattgcatggttttcatttcagattagctattggatacctcacaacccaaagcttagtcttctcagagaacctccatagccaacagcaatgcatcatattgttaaatgaaagccaaataagtttcattagaaaaggcaatgagggagctgggcacagtgctcccacctgtaatcccagcactttgggaggccaaggcaggaagattgcttgagcccaggggttccaggccagtctgggaaacaaagtgaggtcctgtctctacaaaaagaattaaaaattagccaggcatggtggtgtgcacctgtagtcctagctacttgggaggatggcttgagcccaggaggtggaggctgcagtgacctatgattgagccactgcactccagcctaggcaaaggagcaagatcctgtctcaaaaaagaaggaaaggaaggcagggaggaaggcaggcaggaaggcaggcaggagggagggaggaagggaggaaaggcaggaaggcaggaaggcaggaaggcaggaaggaaggaaggaaggaaggaaggaaggaaggaaggaaggaaggaaggaaggaaggaaggaaaatgatctaagggtcacagtgggccaccactaataataagtcaggattgtgaggcaaggtggtacagtggaaagagggaaggcaaaagtccctattctgcaactaacactagacaagcttctccttagatctcaatcctcccagccataaaatgggggaggaaataataccccttctatcattcttagaaggttggtttataggctcaaaagaagggatacaatgcacatgcataaggctttactgctgagatgctggccctagggactagcaaatgtatggacttgaccctcccatgatgtgagtctttttttagttgttggagtctcactgtgttgcccaagctggaatgcagtggctactcagaggcatactcacaactcactgtggccttcaactcctgggtgcaagcaatcctcccacctcagcctcccaagtagctgggactacagaaatggaccaccacagccaactagtttttttatgaatattttttgtagagatggggtcttgctatgttgcccaggccggtctggaactgctggcctcatgcaatcctcccgcctcagcctcctgagtaactgggaccactgggaccacaggcacatgccactgcattctgcttaaaacagtaacgacatgtataactgacttcaataataacaacagctaatattattattaaagagctcactccaagcccacatgtggagagagagaatttctgcaagtcagggcaaataaagggttgggtcagaggcctcgctgatggctggaacggaggaaggagagagttggtgggcgctatcttacccatttctctctcctaccctggaagacgaaagccctcatagagaaaagccaagatgccccagctgactgcctgccagccaatcccagacgtgccagggaagccaacctagatcacccagctgcccattaacctgccagctgaatgcacagcaagcccagcagaaaccagccaaagggcccagacagtagcagtgtccagccaaactcagagtggtagttcctttaagtccctaagccttgagctggtttgttatgcagcagtagctaagacaccaatcaaacaacctccttgtacagataacaagaccaaggcccaggaacatctcctgctgttccctctgcagcctcagcctatctgatccatccctctctctgcctccagagcgacagttccaaatgcaaatttcatcaagtctctgccctcccaggacccctacgtggctccccagggtcccacagaactgctcaaactcctcctcacctggcagccccaggccagccttccacccacacctttccatatggattctctggcactccccagaagtttgtcgtggtgctgcccaaaaagagcaaagtcccccagaacaccaagccagctatccctgctctcagctggcagcacctctccctggaccggaatgccagtcctccggccacccttgccctggctcacggcttctgagtatcttcctgagcatccactctgccctggagctcagtcccctgagatctggggctcttactcaccttggagtagtccgcagagcttggcatgggccctggattccctgggcgctgctaagtctccaccatggctgctgcagccactgctggtgaggcatggtcaccccagcctcaccccagggggagagttcaggtcgcgtgatgagacggaaggagcactgggttcaagacatgccccttctacttgccaccatgtgaccaagaggcaggtgatctaaacggctcagaggcttggtttcctcatttgcaaaatgaagctgataattcctgccccattcacagggacgctgactgtgaaagccaaaattcactggagactcatctgtgccaggtgacctcttagtatgccagccacccctttcactaaatggcaggaatgtccgacccttgcatggcatatccacccaaagccatttctgccactgtgcaacttgtgttataccataaacattgttctctctctctctctcccactgggaaaggccatcccagcatctttgaagtccccactgcactgggcaggatatctggggaaatcaggggttctgtcaaattggcccatttcacagatttcagaaatctttaaaaccacacctctggtcatagggagtgtgtgtagtgatcctaaaaaatttaaaaaaaaaaaaaaaaaaaaaggtctggaagcagtggctcacacctgtaatcccagcactttgggaggccaaggcaggatgatcacttgagcccaagagtttgagaccagcctgggcaatgtagcgagaccccatatatgaaaaataaaagaaaaaattagctgggcatggtgatgtgtacctataattccagtttctctggaggccaaggcaggaggatcacttgaacccaggaggttaaggctgaagagggctatgataaaaccactgcgttccagcctgggcaacatagcaagaccctatctctaaaaaataattggtcgagcatggtggctcaagcctgtaatcccagcactttgggaggccagggcaggtggatcacctgaggtcaggagttcgagaccagcctggccaacatggcgaaaacccttctctactacaaatacaaaaattagccgggcatggtgatgcatgcctgtagtcccagccacccgggaggctaaggcaggagaatcgcttgaacctgggaggtgaaagtcgcagtgagccaagatcgtgccattgcactccagcttcagggaccgagctagactctgtctgaaaataataataataataaaaataattttaaaactacctgggcatgcttgcatgcacctatagtcctagctacctcttagctagtcaggaggctaaggcacaaggaatacttgagcccaggagttcaaggctgcagtgagctatgatcacaccactgtactccagcctgggtgacacagtaagaccctgtctctaaaaaataaaaataaaatttaaaagatgacctgcgctaggcacagcctgccaacctgagtggctcagatgacagccctccctaggaagtgaaggttgaaagcagaggcccccagaccccacctgcatggcctgtgtagtctctacacctaagcttcacttcctcaccttcgaccacatgcttggtgaaatgggaaataggagaagctgctttataaaaataaaaatgaaaatgcaattgtctgaccaataaaaagcattcctgtatgtaatcccagtaatagattttttaatcctcggctgacacactgttatgtgttcacagttattatctgtccacttccaaaccttaagaggttagattgtttaaagatttgttagctatgaactgcttaaagaaggcgaagtataaacttctagctaattgaaaaatagcattttatcagattttcctctgatattatattgtaatggttgtacttagagcactctcaatacttcaataagtggagaaatttaaaaaataacatcttcagggctttgcagaaaatgtggctgttaccaatttatactgcttttttaaccattattttcttatatttcccacaatgctttggatcagaagcaaacagaaactgagtgattaccccaaagtgtgctagatgaactggaaaaagtctattcaaacaaagctcattagttctgatacctccagggctatgacaaattaagcggctggtgagtgcgcttgcacacaaaagaatggtgccgaaaactagggctgagctaggcgctgtgtcaataaattcccctgaaaaaggtaaaaattacaattggagttaaaatggaatccctttaaggagcatgtacaaaatagatcatcccttctttcttaagtacatttgtgaacccgcccgtgatgaattattgcagcccgggaagtggccactcaagaggggttgcttggccaggtgcacatcggagtcgtgggctgctccaggcttccacctcactcctctgcaaagacttggccctgctgggaggaaagtgttttagagcccaacaagcagagcgtacatgctcaaagacggaagtcccggtctgcagctttgcctactgggctccaggtgaggggctgcgctattcccaaagccaggtgggcagcctcccagctttgaagtgctccatgaccttgagatcaccttgttttctcagccaaaggaggactgtgcattgtaaccatgggatctctttttcctggtttgggaatcagtgtctatgagggttcatagaaaattcttaaaagtagttgtgcttttaacaaatctgtcgcctagaagcttaaataaatattacagcattggataatgtcttttaataacgaataaatattattattagacactggagactaggaaaggtaagagggtgggaaggtgggaggcggtgagggatgagaaattacctgctagatacaaatgttcacaattcaggtgatggttacactaacagcccagacttcaccactaggcaatatatccctgcaacgtaactgcaccttctaaatctaaatctttgtttcgttttcttgttttttgttttttgttttttgtttttttgtttttttgttgttttttttttgagatggagtctcgctctgtcacccaggctggagtccagtggcacgatctcggctcactgcaagctccgcctcccaggttcacgccattctcctgcctcagcctcctgagtagctgggactacaggcacccgccaccacgccctgctaattttttgtatttttagtagagatggggtttcaccgtgttagccaggatggtctcgatcccctgacctcatgatccgcccgcctcagcctcccaaagtgctgggattacaggcatgagccgccgcgccaggcctctaaatctattttttaacattttaaatgttgaattaatgagcaaggctttagggtaagatcacaatatgagggaaggagggtatcaggactggatgcagattctacagatggtccttgggttctctggaagacatggtggccacacatgcccaccagactaaggcatctgtgggtgcctcacagtgctccgtgacctcaatggcagaatttctgtgccacagagaatcttgacttaacaatgattccctggctatccaagtggggaaaaccctctgagagcacccagtccctagaggaacaagggccaaattgaacccacagaatttttgccccatacagtgttgtttttcctctttaatggaaatatttgccacttagaaatcagaaatttcccacaaatgttcagattcccagctcctttgggaacttgaaagatgtagccaaaatggacccatattgccacacagcagaaatgtccaggcagcatcgcagatgccccatttaacaaacacacacactccagcctcggggggccactcccagcccacagcacacaggtattctaacatcctggcccctgaaggtatctgagttcacagcctctgatctggtcaatcatcagtctagtagacatggagaaaataagacccagaaagcaggggtagcttgcaggggctacagtgggagcacagcttcaggactagacttcaagtcttggcatccccagtgccatgttcactgaagctctccaccatcctagccccagtggagtgaattcctctctcgtttgtgtctacttctctgccatgttcagatttctctcaatccccctatctggccattcacccatccaggtgaggtaccagactttgggctagactctgtcatgtaatcatctgcttagagtccatctccaccactgtctatgagcaatttgaggatgggagggatgtggtaatgatctctatctgcagtgcctagcacacagtaggtctagcaaaatcctgcctccttttcatcaagcaatctcatggcatccttcagactctgcatcctgaatcttgatggccatatacaataactaagcccaagaccaccatgaccaccagtctcttcttcaacacgtgaccaatcagccatctcagaccacacatttctgacacaggcctctatattctggccttccttaggtccgctgaggtcactgagaacacctggtggccccagaaggttcattccctccaggtaggtagggaaaggacattctttgtggacccttctgctttatgtttatattttattttatttattttattttattttttgagatggagtctcactctgtcgccaggctggagtgcagtggcacgatcttggctcactgcaacctccaactccctggttcatgcatttctcctgcctcagcctcccgagcagctgggattacaggcatgtgccaacacgcccagctaatttttgtatttttagtagagacatgggttcaccatgttggccaggatggtctcgatctcctgacctcgtgatccgcctgtctcggcctcccaaagttctgggattacaggcgtgagccaccactttatgtttatttttacttacatttccggaaccagtgacatggagggacaattcttcccacgttgatgcatgctgtcgcctaaacatgaactgtttttgcaatcccgcctcagggagtcatagctgttgcatggaggcatgcgattccaaggtccaaggaccacaggggaggcgagggtcaggggctgcaaagcccatgaaggaaaacagcaggtccggacctctgtgctcccccaaagcccaaccgcctttcactgcgcaggtagctccaggcatggcatccgctgctgtagagaagttacaaacaagagcacaaaggcatcaagttttttacttttgtctttcttcctttttttttttttttcaacagagtctcactgtcttgcccagactggattgcagtggtgcaatcatggctcactgcagcctcagcctcccaggctcaagcgaacctcccgcctcagcctctgggactacaggcacacgccaccacactcagctcatttttttattttttataaagatgaggtctcactatgttgcccggggttggcctcaaactcctggcctcaaagaatcctcccaccttggcctcccgaaatgctaggattacaggtgtgagccaccacacccagccatctttcaaaagttgagaagcgggtgggaaaacattaggagtcacatacaacccaggtgctcccatcactcaatcaatactgattgatcaaaggggagaacagtacaaagtgtgaggctggtagggctgtctgaggacacctgggtcccatcccccaacttagcaggatccaacattatattagttcattttcatgctgctgataatgacatacccgagactgcataatttataaagaaaaagaggtttatagactcacagtttcatgtggctggggaggcctcacaatcatggcagaaggcaaaaaggtatgtcttacatggtggcaggcaagaaagagattgtgcagggaaattcccctttgtaaagccatcagatcttgtgagacttatccactatcacgagaacagtataagggaaaccacctccatgattcaattatctcccactgggtccctcccacaacacttgggaattatgggagctaaaattcaagttgagatttgggtggggacacagccagaccatatctaacatcctgcggaactccctgcaccactaggctgggagggaaaggacatgtttgatcacgtggggaacaggtaggtctgaatcagcccctctcagttaccccatgctccagagctgtccaggaaaacaaccaacctttcccctacacctgggaagaaggtgcaattggatgggagagaaagcatatggagctggggcgccaggcttcaagatgcgggccaggctcatcttgtatatttattgcagcactatttacaatagcaaagacttggaaccaacccaaatgcccatcagtgatagactggataaagaaaatgtggcacatatacaccatggaatactatgcagccataaaaaagaatgagttcatgtcctttgcagggacatgcatgaagctggaaaccataattctcagcaaactaacacaggaacagaaaaccaaacactgcatgttctcactcataagtgggagctgaataatgagaacacatggacacagggagagaagcaacacacactgaggcctgtcaggggttgggggacaaggggagggagagcattaggacaaatacctaatgcatgtggggcttaaaacctagatgacaggttgataggtacagcaaaccaccatggcacatgtatacctatgtaacctgcacattctgcacatatatccaagaacttgaagtaaaattaaaaaaaaaaaaaagatgagggccaggcaggggcagacatgtcatggatgtgggaagtcataggcagcagcactgaaggacccctggctggccctagtgcctgtgcacaagccacgccctccatcccacggagaagaggggtggggaatcctcacctcaactgaggaacctccaattaactgtgtttccccagaacggattagattgagcctctaccactgagcacacaggggtttgaaacagagactcatctgatttacagaagcataaagaaagttgcagtatttccgcacctggtacctctgactttgtcaccgccacacagtatgctggaaagcagcttccccaggagtatcccccctcccctgctcaaccctggggggtttagaggaagaaggagaacaggtccagctgctgcctaaaaattcctgggcatacagaggtcagtgtagggggaagagggcatcctgagggcagggcggcagtggggcaactgaaaggctgttttctggtttgtccacaggcagggagtaggaagatcctagtggcagaagcctgctggcatcaacagcctggcaggggctctctgaagcctagcccacccttagtcagaagcgcaggaatggctgtgatgggactgaagcattcatgatggccccaggccagagacatcccggagctgagctccccagggctactccaggcctgggccaggtaagcagatgagtagactcaggggtcagcaggcacacagcaaaacaggggtccctctcctctattgcacagtgcttcctcctctccacccccaatgcccctcaagcccttgccatctcaattctccttctcgttggattctggggtccttctcctctacttcccccttaccccttctcctgacaatcccttctcatgcctcctaaatgtagaatttcctgaggttctgagctcacctgtcctctctctcatgtctcttcccagtgaccttgtgctcacacctccagggaagtgacctccacgtgtccagttcccaccccagcccctatcccaggctcagcttcccactcaggggcccactcacactctgatgcagtctcagtgtctccaatctattcccaagaacaactcatctctgtcatggtccccccactgccccaaggaggtaaggccaggagggaaggcacctgcgttggggtgttggggagtgtgttgtggttggggtgttggggagtgagccttctccacacatcctgccgtggtgttttcacaatcttttgctaatgtttcattcatatatatatatacatatatatatatacacacacacacacatatatatatatatacacacacatatgtatatatacatatatatatatatattttttttttttttttgggagacagagtctcactctgtcacccaggctgaagtgcagtggtgcgatatcggctcactgcaagctccgcctcccgggttcacgtcattctcctgcctcagcctcctgagtagctgagactacaggcgtccgccactacgccctgttaattttttgtatttttagtagagacggggtttcaccatgttagccaggatggtcttgatctcctgatctcatgatccacctgcctcagcctcccaaagtgctgggattacaggcatgagccgccgtgcctggcatttttttttttttttgagatggagtctcactctgtcacccaggctggagtgcagtggcatgatcttggctccctgcaacctctgtctcccaggttcaagtgatcctcattcctcagcctccagagtaaccaggattacaggcacctgccaccacgcccagctaattttttgtatttttagtagagatggggttttaccatgttggccaggctagcctcgaactcctgacctcaggtgatccacccacctcagcctcccaaagtgctgggattacaggcatgagccaccacgcctggcgtttcttcagtatattatcaccatgccaacatggtacccttaaaaaggggccctaccattgcaaacaggggtctctgttggagggtgtgcttaggagaacgtcgctccctcccggtgtgcctctctgtcacctgccacatcctactcatccttcttgcatctgctttaggcccctccttcagaggagcctgccctgaccactgagaccaggtcagtctctctgctatgtgctctctttcctcaaaatatttatcataattcaattaacgatctgtgcgataattaatctaatgtattccttctctcctgctggattgcaggtttcatagcagaagcgataggaggctctcttactagcatggtgcttgtacacagtaggcactcaacaaatgcttgaaatgagagggcacatttcttcatttttaatagatgcttggtgggaactagccacatgtgattggaatttttattatacaccattgtgataaatttgtacccaaattacctattcagtaatctaacagggtaaacatatagtccctacagcttctagaaagatgcctgtgcccctcaccaaggaaaacagttaagccgtccccctgctcaacccccacccccaaagaagagcccaccaaaggccaagcctcctaatcgaatttagctcttgtacccataatcccagcactttgagaggtggaggaggtaggagttcaagaccaacctgggcaatatagcaagacgccacctctatgaagaaaatttaaaaaaaattagctgggcgcagtggagcacatctgtagtcccagctactcaggaggctgaggtgggagaatcttgtgagcccaagagttgaaggctgcagtgagctgtgatcacatcactgcactccagcctgggtgagatatagtaagataatgttgaaaggtagagggaggggggagagagagagaggggaggaaggacaaacactagtaaatagagagagagaaaagagaaggaaggaaagaaagaaggagggaaggaaggaaggaaggaaagggaaggaaggggaagtgaagggaagggaaggaaggaaggaaggaaggaaggaagaaggaagaaggaaggaaggaaggacaaacactagtaaatagtccagaaccgttgcccctgagcttcaagatacctgagtgcttgaaatatagcaaatccactctactgcccatcactggtaaaatgcggagaatgacccagctggccccagagagccccacatggctggcactgagcacttcctaataagcctgtccttctgatcagctccttccctgcacatccacccatcgacatgacagtatcttggaaatgtggagagttttttcatggcacaagtaatagatgcttattcttgagaaatgtgtacatatggataagcaaaatgaaaccacccacaatttcacctttcacctaaaacaccatgactgttggcattttggtggactcccttcccactttcctatctgtagcctctcaattggctccttctcaataagctctacattttgaggtgcagggggttcatctcttctctagctgcactcatgcccttggcacctgcccgatccccttgcttcagctattagctccctgttgccagttcccaggtctacatctcagcccagcctccctccctaattccaggctctaagctcccagtcatcgccacctggatgcctactccatgtctcaaactcagtatgtccaaaaatgttcctccaaagctgcataaaataaaaagtccaggataaacaaaacagcaaaattttaaatcaagacaagacccagccctgcactggcacgtcactctcttcattttaatccccacccttttggattctgtctttatttagaatgttgatattttgttcatcaagagtttttgcattaattttcactttttaaaatattgcattaaaatatgattcagctttatggctgagttttctggcacacctttaaatggtgcacctgaagtgagtgtctcactccccaacttctaatcccaaactcgcccccccacttcttggccaccactgtacaaccaacagcccaggcacacacctagtgtctctggcatctcaagtcacttctagacttacaggaagcacctcatctctgagtatggagccgatgttctgagaagctgccaaaagtgatacccagaagatgcaatgcaaaaatgtggggaaggtactccccacagagtgaactgtgaccagggggaaaggagaaaagggaaggagccaggcacactaatttctcttccctgtcacccaccgactacttagagacagagtttctgcacacacccgatctggagaagatggagacgccaagcagaggcacctgctaagccacctgctgtgtctctccccagccagcatggggcaggaccatacacatttcttcccatccctctatgcttcatgcctcctctctctttcccccttctctctctctctctctgtctctctctctctctctctctctctctctctgcctgcagtttgcacctcccaaatgaagcatcagccctttaatccttgcctcaagctctgttttccagagagcctgagctatggcaggtctgcttctggattttttgtgtttcgtcatcttgatctattttgtgcctttaaaatgcattttcatatctaatacaaattcttcatcattcttccccgccccccccaaattcccttgcctattattactcatttaatcatccaaatgaactttcctacagttaaattctgggagaaagaaatcgctttctatttttcaagtcatcttcgcatttattatcttttttccatgcaacacaaatacttcttaacagtttggatgttagatcggccctgggctctatgtgaccccaagggaattgcaatgtagctggggaattaaagagaatagtaaataaccttgatttaagccgtcagggtaggtgtccctattcccagttggtatagaactacacagctgggagaggctgagttgagattagagtcctggtctctgtgatccccaaagcccatcctctgtccattcaccagcctggaacactgaagaccacaaagatcatgagcactggatgaactcagatgaaggagaactcgtgggtggtgggggcaaggtagagggtgacatgccagagaggtcttcaggaagcttttttttttttttctttgagatggagtctcactctgttgcccagactggagtgcagtagtgtgatcttggctcactgcaacctctgcctcccaggttcaagtgattctcctccctcagcctcctgagtagctgggattatagtcatgcaccaccacgcctggctaattttttgtatatttagtagagacggggtttcaccatgttggccaggctggtcttgaactcctgacctcaggtaaaccacccgacttggcctcccaaagtgctgggattataggcgagagccaccacgcctggccaatcttcaggaagctttaagcttctagctaggatttaaggaaatgaagaaagagaatattactccaaggagagagaacaatacctgtgaaagatcccagaagcaattggaattggagtccaagaagaaccctaaagcagccagaccccacagggcagggagagcacacggcagtgggctggggtcacctgtggcttcctcgtgcctgtgcaatgctcactggtgtacctgagaactttcctcttgacagcgtaagaggcctcaacctgtcccacaaacttagcttggcagcctgtgtttcctggccaaaggcatccaaggagatgacccaagaccaggacagtgatgccccacccttgttttctaggattttaaaaattgtcttcaaatgttcaattgttcttgaaattctcaaaagaaaatttggcttggaagtaatggtagtggtctttgtgcttcttaaagattcttcaaccaaagtcaggcacagtggctcagcgctttgggaggccaaggcaggaggatcacttgaggccaggatttcaagacaagcctgggcaacatagcaagaccccaaaattttttaaaaattagctgggtgtggtggctcatgcttgcagtctcagctacttgggaggctaaggcaagaggatcacttgagcccaggaggtcgaggctgcagtgagctgactgcaccgttgtgctccagcctaagtgacagagtgagaccccatcttaaataaataaataaataaataatattgtttttctggaaaactgctctttcagctttttctttttttattttttttttattattatactttaagttttagggtacatgtgcacaatgtgcaggttagttacatatgtatacatgtgccatgctggtgcgctgcacccactaactcatcatctagcattaggtatatctcccaatgctatccctcccccctcccccctccccacaacaggccccagtgtgtgatgttcccctccctgggtccatgtgttctcattgttcaactcccacttatgagtgagaacatgtggtgtttggttttctgttcctgtgttagtttgctgaggatgatggcttccagcttcatccacatccctgcaaagaacatgatctcattctttatgtctgtgtagtattccatggtgaatatgtaccacattttctttatccagtctatcattgatgggcatttgggttggttccatgtctttgctagtgtatatagtgctgcaataaacatatgtgtgcatgtgtctttatagcagaatgatttatattcctttggatatatacccagtaatgggattgctgggtcaaatggtatttctggttctagatccttgaggaatcaccacactgtcttccacaatggttgaactaatttacattccacgaacagtgtaaaagcattcctatttctccacagtctcgccagcatctgttgtttcttgactttttaataaacgtcattctgactggtgtaagatggtatctcattgtggtttttattcgcatttctctaatgatcagtgatgatgagctttttttatatgtttgctggctgcattaatgtcttctacctgacttgaaactatactacaaggccacagtaaccaaaacagcatggtactagtaccaaacagacatacagaccaatggaatagaacagaaccgtcacgagtaacaccacagttctagaatcatctgatcttcaaaaaaccggacaaaaacaagcagtggggaaaggattctgcatttaataaatgctgctgggaaaactggctagccatatgcaaaaaactgaaactggaccccttctttacaccttatacaaagattaactcaagatggattaaagacttaaatgtaaaacccaaagccataaaaattctaaaagaaaacctaggcaataccattcaagacataagcatgggcaaagacttcatgatgaaaacaccaaaagcaatagcaacaaaagccaaaattgacaaatgggatctaattaagctaaagagcttctgcacagcaaaagaaagtagcatgagagtgaacaggcaacctacagaatgggagaaaaattttgccatctacccgtctgacaaaggtctaataccaagaatctacaagtaacttaaacaaatttacaagaaaaaaacaaacaaccccatcaaaaagtgggcaaaagatatggttagggccttattctaatgcaatggaaagctgccatggaagggttttaggcagggtagtggccggaccagatttctgtttaaaaaatcactctgggtgctttgttgcaaacattctgcagtggaatcagggagatgcacaaggaggctgatggagcagttcaggtgagagattacagcagcttggaccagggggcagtggaggtggagacaccgactgagttagcatctgttttggaggcagagtcaacacagttacaggttcagaagttaagggaaggaaagaaaattaagaatgactcctggttcaaccagtaccttctgtgtgcaataccctaaatgccctgcccatagtcacccaacacacctaatgcgctggtggcactactggcctctgggctctggggttgctatgaactgaattctccccctcctaaaattcatatgttgaagccctaacttccaatgtgactgtctttggagatagtgtcttcaggaggtgtattagtccattctcatgctactaataaagatatacctaggattgagtaatttataaagggaagaggtttaattgactcatagctcagcatggctggggaggcctcggaaaatttataatcatggcagaaggggaagtaaacatgtccttcttcacatggcagcagcaagaagtgtagagcaaaagaggggaagccccttataaaaccatgctcttcacaagaacagcatggaagtaaacgccctcatgattcaattacctcccacagggtccctccgcaacatgtggtgattatgtgaactgcaattcactatgagatttgggtggggacacagccaaaccatatcaggaggtaattaaggctcaatgaagccaaaagagtgaggtcctaatcccataggatagaagggaggggggtcaccagaaccccaccatgttggctccctgatcttggacttctgatcttggacagttctgaggcttggacttccaggctcagaactgtgaatttctgctgttctgttgttcaagtggtgcagtctatagtattttgttatggtagctgactaagatggggtcctactgccgtgttgaggtttgccctccccttccatcttccatagcatggagtgttgggggccaaggagaggctaattttaatagaatggaagtcccccagaagccaacagccctggcctatactctccaccttgcagaggggaccctctcacccctcctggttctattgccagctggcccatgtgtctacttataagccccatcacttatgcttacaaagcatccaatgttcccaggagtatcttcactacccatcgaaaaaagaaaaagaaaaaactcctatgccaaagaacctggaagaaggtattagtggtatgaaatattctggattaagacagtaactcttgcaactttgagtcatcctataacctgaccctgcacactgtgcaggtggttggaatactgctttgttgttgataaggcaatccataaacttgtgtgtccacatgcataagacacatgagtaaaagacaaaagccaaaacaaccatgtaggagagtacctctgcctcagtcttttttctttttttttttttttttttgagacaaagtctcgctctgttgccaagctggagtgcaatggcatgatcttggctcactgcaacctccacctcctgggttcaagcaattctcctgcctcagcctcctaagtagctgggattacaggtgcccgccgccacacccagctaatttttgtatttttagtagagatggggttttaccatgttggtcaggatggtctcaatctcttgacctcatgatccacccacctcagcctctcaaagtgctgggattacaggcatcagccactgcacctgaccctctgcctcagtctttagacttgaaaaggtggtctcacatcactggccaagctaactcaggccagttcaccatcctggtgcaagatccaaaaacttcctcagtgttttattgtccaggtttcggcacgatgcaaggctttgctgtatctcgctacctgggtctagctttgtcccagctggggatgtggggatgctgcaggatgtctaatgcaggagtgttggcaccctgtccccaggaggggaccccacttttgtccccttctcctccgtgtccttgccagctcctaagagcaaggaccacagttgactcagacatggccttgactgactcagacagacagcaaaaacgaaacatgagctaaaggcaagaacacagccctgggacccaaataaagacacaattagcaagaggaatacaagacctcgtagagggaataccttgtgtgccggggcttgaagatcaaggtggatttctacaggcagaaaattaacctgtgtcccttttctttgggtctgcctggtgaatggaggctgtggtcacttgaacccatcaccttttcagtatttgccaacatgcatgagctgagagccatccactccaggatctcccgtgatgagtctgcccaaagtcctgggcttccctctccacgtgtgcaactgctgtaagccgctctgctacttgaagagccgggtctctctcctgaccagcagacccctcagcagctgtgcaccatcacagcaccagccccctccccattgtcactgccaagctctccctgagggcttgcctggagccacactgcacctctcaaccctaggtacctgatgtccaagcaggcaactgtaagggaacactgcaaagagagagaaagtggagactccagtctgtccccgacgctgcccaagggaagggacatctggagactggcacagggacatctggagactgacacagactggcccctgcacagagcgccctgagccctacagcttcagagcctcagcatgattctacgaagcagatgcattttcatattcattttaccaggagaaaaccatggttcagagagtcagcataaatccccaaagaggccacacagccataacacgtccaagttgatgtttggctccaagctcctcatggttttcaggcacccagtgaggaatgtacaccctgacattcactcatgcatgtgcaccgagcacccgcgtcagctagtggggctgcacggagggctgtgccctgtcgcgctccatcctgctctcgccctcagaagctagggtgaaccaagagtgcgactgtgattggaagaagcatttgggcatgactactgctacaatgatattacacacacctatgtaggacgacgtcacagtgtcacctgtgctggggaagcatagggaacacactgtgtgttcatcacagtcacagggtggctgcctcttctgtgcactttctcctcgaacccagaccatctcccaccctcatcacagatttcagaccctgaccacccctctggccccaggtagggtgatcaaccacccagcttgcccaggactaagggggttcccaggatacaagctttcagtgttaaaacccagaaagccctggcaaaccaggacaagtttgacaatgctaaaggcaccatattggagaagcccacagtcctagcccaggggcctcatccaggacagaataagagttgcctcaccctgcagatctccacttctgcctgcagcttaccagcaatggccaatgcctcatccttagggccaagcatgctctactgagctacttttcagcttcatgggatttctcagcctcccccacaagcctttcctttttggtttttggggctttttttgctttttggttttgggggtttgttgggtttttgttttgtcttttgtttttttggttttttggttttttggtgttttttttccttgagacagggtctcactctgttacccaggctggagtgcagtggcacaattgtagctcactgcagcctcgaactcctgggctcaggaaatcctcccaccttggcccctcgagtagctgagactacaggagtacactaccataatcggctaatttcttagctttttatagggatggggtctcgctatgttgcccaggctggtcttgaactcctaggctcaaacaatccttccactttggcctcccaaagtgctggaattacaggcatgagccacggcatctggcccaccctttatttaattcaattcaaacactcaatcggctactggatgaccagttaataaagtagatccaaatgttaggttgttcccttaatctgacactgtggcagctagtccccaggttcttgcattcaccatttttctattaataagaaaactttttctctgcctggcaagaatgcgaaagcaagttaaaacctgctaggaaacagaggcccacccataggatggcacgagagaccaagtgagttctaagagatgtattcttatccgagagcccaaagacaagaagcagacacagccacaagctcccaggtacccagcatccttgactttgcattttgactcacagacctacgaacgtccaagacaaagcaggagggtggatcccacagggcataggttctgctcagggtgaccatagcagctggctcagctgccctccctcagcgggggtctcaggaaacactcttgccctaccagcctcctcccagagaagccacggctgtctctgcccttgcagccactgccagccaggaagacaagttctgggcagagagtgagctggaccctagggaaatgaccctagggagattgaggcttcattcctttccaaagggtccagggatgccctatgacaacgtgttcctgctgtaggttatcaatcctagggcacaggttgcccagaggagagaaacagggtccagggaatgttgttttcaaagaaaagatcatgacattgcaaactcatgtttcagcaagggcagcttgcagaatacttagatcagctaaccaccgtcctctctcttgaaccccttctctgtccacggggaggcaatgcccccacgttgctgtttaacattaatgtttaacattagcatcttactgttaatagcagtaagaaatttctgggccaggcacagtagttcatggctagtaatcccagcactttgggaagccaaggtgggaagattgcttgaggccaggagttcgagactagccagggcaacacagccagaccctgtctctacaaaaattaaattaaatttaaaattagccaggcatggtggcacgcacctgtagtcccagctacttgggaggctgaggtgggagaatcacttgagcacaggagtttgaggctgctgtgagccatgatcatacattgcactccagcctgaacaacagagcgagacgctgtctcaaaaaaaaaaatttaaaagaaaaatttctggcccaataacttgatcatctgtgtacatcaagtatgttcacagggttcaaggattcaaggacagaggcaggaatagatgacatggatgcttcctcccagtctctatccctctgaacttctaagccaggaaacaaaaggtgagatgcccacaggaatcaggcaggcaacataaatgcatgatgttagttacatgtaacagtgcaaatcaaagatctgcagtgacagccaatcagcacaggcctgggaagggtgtgtggagagatagttatgactgcaaattaacagcatagccacatctaaaaggagtagcctgacttcacacctctcaattgcggtcaagaagaaacgcccaggtttttctaagagatgcccagaatttggatgtttatgtgcaatcttctgactttgaaatgctggcatttaattcaggttttgttaaaactctaaatagatcccaaaacccacctgggcctgaagacagcctatgtgtcgtctgtctgcagcctctcctcgaaatgtttcactagcacccagagaaagctgacctggctgcaggggccccgggcaggctcaccgctgtcacatcccgggagattccctgcagggaccagggctccccttctgccaggaaagtggcctatacacatgcagcacaagccagtggagatgggcgtggggcccccacttggtggccctgctgtcaccccaattgaaataggtgttcgaacaaattaaactccacaccaaagttctgtttccctgtcgagtcagcacccagttccaaatgtctatgattaacacaactcttaatgtatctttctaaatgtgaaaccattttgtgtgcaaatattgcaggaacaagaattccttggtccagcgagctcgaggcttcctctactggttagaggccctgagatgaaattaccctgaatgcaatcctcttctcctattctttttatcttgagttccaaatgaaatacattgggaaaataagatgtgctgccagcttctgggccaggggcctgaattcttgcaaacaggcatttggctgagggggcatggagcaacccagtctgcctgtaaatggtttgctttggaagaaatggctttaatttactgcaaagtttagggtggccctgcaggtatggggtgctggccccccaaggtgtccaggaagggatggggcagcaaggtgatgtcaagtacaacctcccagctctgcagcaactcaggaccatgagttaatgacagagaagtgtggagagcctcctcccatgtgccctggagcctcagctgctgcagagcctacacagaggtcctggcattccgactaatcgggcattcttcccagttctgctgccagcttgcccggtcagagctgaggccacagaggacccagtattgtcaccagaggcaccctgccccaactctgagtctcttctctctgactctggagctgagccagcgtcttgagcccatgacctgtgcagtactcaggccccacattcctaaatccaggccctgccctggatttagatgctccgctgtcctgtcttgaaattcctaattcattttttaatgaggaactttgtgttttcatttttattttaccctgggacctgccatggcttggagaaatcacactctgattgccatactgctgtggggctcaggtctcgaggcagcgcctcaccccaggagacaccgggggaaggtgagctgacttggagccaccttcccggctgaggaagctgtatggtttgaatgtcccctccaaaactcaagttgaaccttaatcccaaatgcaacagtattgagaggtgaggcttttaagaggtgactggatcctgagggttctgcctttatgaatggataaaagggctactggattaatgcaaggggaactggtggctttagaagaagggagacctgagcatagcacatttgacacactcagcccctcaccatgggacactctgtgccacctgaagactctgctgagagtccccaccagcaagaaggctctcaccagatgcagcccttcaaccttggacttctcatcctctagaactgtaagagacaattcccttttctttataaattacccagttattctgttctaagcaaccaaagacagatcaatacagaaacctcatctcaagctgttcatgcatggctgcagagaactcatcgagggcctagctggagccagaaatgcagggagagcccagagcctgcaaggagggagaaaggcactctccagcacaggcagacacagagctgaaagagcggagtagccaggggctgggtgccatgggcttcctggaggaggaggctcccagatctaggacagaactgaacaagtaaacagggtttggagaagccagggaggctggggtgggggggccagggggtgggcagggaagcaaaaggagaatcagcagggtggagggccctagattgtgccagacaggggccactccagctgctgcaggagtgacttcactcaccctcccggggttatgcacctgccacctcccagacatccccagccccgcatctccctgcacaatgcctgctctgattctccttgcagccagggtgagaggcagtcagcgaacaatgctatctgcacgtggtggcgcccaaaatacggctgtcatttatttcgttatatgaaattagagcacgccttgtagccataatgaatcatttccttcctgcctgggccacggtgtcaggcaggagctcggcatcccccattcagggcctttcacttcatcgcaggctaataataacccacgcgggtgaacacacatcttcccgagacaatggagggcctggatgggcattggggtcatgagtgcagtgcccacagcaggaggggagaagggccgggatggggcctgggctggacactgtggctgaaggaagacagtgcccatggggaggggaaggaaggcatctgggtgggcaccccaagtgggagctggggcacccaggtcccttttctagctgatcccctcaacaaggacaggaaatagctccctcccccaacccccagctattctaccaggattttttcccaatcatgcctaggtccagctcagaggccctaaccagagccctccacagctggcctcactcttcactcagcccccaattttcaaagcactggctccttccacagcttcatcccagccccatcctggcctggggatcccaggagccaccccctgcagcactgtctcacctcacatccctgcctcatgcaggctctgcagtagcaggtgctcagcaaatggatgagtgtgtcctgatggagccaagtccccgggtagctcccgctggggctatgacctgggagcttcatccggccctggacagcagatgcagacccaggtcctgccctatagggcccgccccaccccctaggttaaaggcaagtccagaccatgggaaaaccatcctcccagaccctgtgattattgttcgtctcttatcctgagtataacccataaggcattttattttattttattgagacaagctctcaattcatctcccagggtggagagcagtggcacactcaaagctcactgcagcctccaattcctgggctcaggtgatcctcctgcctcagcctccctagtagctgtgactacaggtgctcaccgccaccacacctggctaattttttattattatttatagagacagggtctcactatgctgcccaggctggtctcaaactgctggcctcaagtgatcctcctgcctcggcttcccaaaatactggggttacaggcgtacatgccctgcctcataaggccttttcatcaccatctccccaggagtaagcacactatctgtcagtttttctgaatgaaagaataaatgaatgagggtcaaaggccatatgctaaatggtatggaggaaactccaggatgagagtgaccagagaagggaggctggtcccgggggaggtgagtagagggaatggcaggcacacctggcccaggagcctttgcctttcctcttctggtttcaggcggctatgagcagcattgcctcttccccatggatgcctggtgcgtacaaccccactaaacggcacttgtgcaccttgcagcctccaattcctgggctcaggcgatcctcctgcctcagcctcccaagtagctgtgactcatctctgcaccctagcctactccgtgctgtgtctctgaagaattctgcccattcctgcctcagggcccacttaagaggctgttccctctgcccagaactgctttctccttcccttctcctcctgatccccaccacgcagcccatgtccttctgtggggaagcctcctgactttccatcctactgagtccccaattacatgacctcacagctcccagcacttatcctgcacctgactacacacaccaggcagtgactagttcctgctgggagatcccatcttgtcaatttccctggaaggatcagccccgtagaaggtggccctgtgtctgttttgctcaccactgcccctcttacaccaaccacaataccagatgcacaggatgtcctcattaaatgttttctgattaagaaaatgaattaatcccataacaagaaactcatcaaatcccaaggcagcccactctactttgttaatagcctgtgttgtttgtctttgtgaaccatggacaaaaaaaatgaaaaaaaaaattcattcctattatttaaattcattcctattatttaaacattaaaattaaaatgcagataactgtattaatatttttgtgtatttccatccagttttctatatgaactttttacataattgagatcctatgtaagaagggattttctatcctctttatcctacaatataataagtgcttgtgaataaaataatgtcttttgcagcaacttggatggagctggaggccattattccaagtgaagtcactcaggaatggaaaaccaaatatcacagcttctcagtcataagtggaagttaaactatgaggatgcaaaggcataagaatgatataatgggccagttgcggtggctcacacctgaaatcccagcactttgggaggccaaggcgagtggatcacgaggtcaggagatcaagactatcctggctaacacggtgaaactctgcctctacaaaaaatacaaaaaattagccgggtgtggcgggcacctgtaatcccagctactcgggaggctgaggtaggagaaacgcttgaacccgggaggcagaggttgcagtgagccaagattgcgacactgcactccagcctgggtgacagagtgagactccgtctcaaaaaaaaaaaaaaaaaaaaagatataatggactttggggacttggagcggggaaaggggtaagagataaaagactacacattgggtacagtgtaccctgctggggtgatgggtgtactaaaatcttagaaatcatcactacataacttatctatgcaaccaaaaaccacttgtaccccaaaaactattgaacaaaaaggaagctttaaaaaaagtgtttatgaaagttggcaaaacttaataaatattattttactgtatcatactttattcttttcttaatgattcccctataaaacacttaagtgttttttcagtattttaagcaatattgcaatgaacatctgtgtagaaaatgttcccattttttaaattgtcttcttagattccatttttgacgtggacacattgggtgaaagctgatgaacattttaaatttcttgatagtatttctaacgcactctttcagaaattctgaaccaattcacaatcctatcaacaaagtacaagtgcctagtttatcacaagcctgtcagcactgactttttttttttttttttttttttgagacagggtctcgctctgtcgcccaggctggagtgcagtggcgctatctcggctcactgcaacctcaacctcccaagcttaggtgatcctcccacctcagcctcccgagtagctgggactacacgcatataccaccacaaccacctaatttttgtttattttgtagaaatgaggtctcactatgttgcccgggctggtcttgaactcctgggctcaagcaatccacctgccttggcctcccaaagtgctaggattacaggcatgaggcatcatgcccagccaacttttgatttttaatctttcctgatttgtcagggaaacaaagaagtattacttagtttcacactccttttttgtgtgtttgtgaattacctatatacatgttttcccaacttcattagatagcctattccatcagagagctctgtctgaagagctttaagctgagccatgaaggaagagaagcatattcatagaaacacaaaagaagatggcatttttggcagcaaactttgtcattaaaaggtactttcctggccaggcatggtggctcacacctgtaatctcagcactttgggaggctgagacaggcaatcacctgaggccaggagttcaagaccaacctagccaacgtggtgaaaccccgtctcttaataaaaatacaaaaattagccaggcggtggcaggcacctgtaatcccagctactcgggaggcagcggcacgagaattgcttgaacctgggaggcagacattgcagtgagctgagatcacaccactgcactccagcctgggtggcagagtaagactccaccagaaggaaaagaaaaaaagaaaagaaaagaaaaggagaaacaccctttttgacaatctcttgaacccaggcagcggaggttgcattgagcctagatcatgacactgcactctagcctgggtgacagagcaagactctgtctcaaacaaaacaaaacaaaacaaaacaaagatgcttcctttgataatatacctctccccacattttcctttctttgtcatagacgagcctgacctcacagccatctgacaacaagagagccaggaaacagtcgaccctatggctcctaagtccataggttctgggcaggcaaagccactcagtagaccaagcctcagtatgaaatgacagcctggaagaccctgacttctgttcctgcaggcagtcttccaccttcacatctgcctgggacactgcagaggcatctctcacccatagatggggcactcagtgctgaagcagacgtctgtcccaaagatccagatcccacccctgcacattttggctgaatcacttcccgtcattccaagcagaggaagatccaaaaattctcacctccatagtttgaacagctaatttgctttttgttcttgttgcagtgagtacattgtcacgggcagaaatgctagctcatacaccaaaaggaagaaaatgtaagtaatccctaattctagcctttgttctacatataggtaacagagatcatatttttaaatcattgttcaatatattcgcatgctctgtaagccatggtttaggaggcaggaagattgatgttttaggagaacagatcccaccaaaactggggtttccaaaacacgtgccagagccctggggcatcaccatgggctgttttaacatttttatttttttttttgagatggagtttcactcttgttgcccaggctggagcgcagtggcacaatctcagctcactgcaacctccgcctcccgggtttaagagattctcctgcctcagcctcccgagtagctgggattacaggcgcccgcaacaacgcctggctagttttttgtattttcagtagagacgaggttttgccatgttggcaggctggtctcgaactcctgacctcaggtgatccacctgcctcggcctcccaaagtgctgggattacaggcgtgagccaccgcacccaccctgtttaaactttttgaaagaaaccagcaacaccagtcagacaccacgcaaactattactgttatgtcgtttagacctaactaatgaaatgttaggctttgggggaatttgttttgtgtatacaatgtttccattttttaaattatcttcttagattacatttttgaagtggatacactaagtcaaagtagatgaacattttttaatttcttgatactagttctaaagcactttttcagaaactaagtgctgtgcgggggagaaaaaaaaagctactaagaatgctgtgagaaaaaaaaaaactgcttgagacattaagggacaccatgaactgagaaagttggagaacttctacaccacaacaaggctcagcagtgacttccaaattagatttggaagatcagtagacttaactccaggcttcgttggcgaaaaaatgttctagatttccctcacgatacctggagcatagagttccatccaggcaggaagtggaagaaggaagagcccacctttttttggcccaagggatttgtgggtagaaggaaggcggaggaaggagacacacaggaggcatgtgagtgcccacgctcctctccagatttgaccaagagtaggagacacatgcaccaagtttagggggatgctgaggactcagggagtctcatgcctcatgtttaggaactggaaagaaatgcctttccaggctgtaccactaatctaagaggaagtggccattactgtgcaaattcagcagctctgcatgggtttgcaagtgggatggaaatttactttctcaaactgctctcagtttccatatggcttgaaaagggcaaagaagttctcgaggccccagagagaggaaaggaaggtgaccaagctgaattccagagacctcccataaagttatctgaggcaaggaccaaaagcccaggatccaatggcagcacactgagaaacacggcgtggtctgtgagcaccagcagagacaaaacgaagccagatcagccaaggagcatccacgggtcttgccccaccaggaagttcagactatgtatgtctaggctcagttatgctgcagtaacaagcaaccctgggttccaggtctgtgtgctatccccactctacatccactgaagggtggctggaggttctgcccaatgttgccctcactgagggacacaggagcagcccccatctaaatcataactagtcaccttggcagggggaagggaatcaggagggtcatggaccagcactcaaagacttccacagaaatgtgggtcatcatctcagctcaggcttcactggccaaagtgtgtcacgtggccatgcctaactccacactaatgcaaaagtgcagtcctagcctgtggctagatggaagaagccagaaatattggggagcaacaagtttcagtaaatgtcagcaggtgctagatgggacagtcatgttggaccagccactctgcctcagagaaagcagggattcaaatatttcatcttttcccctttgtcactgagtcctgtgagccccctacccccacacagacagtcatcttcttgaagaaagtccagtgaaaaggacccaagtgcctgccttatattccactttccagattagactaaaatttaggagttttattccccatgggtcttgaagaagacagagcagtttgagaaatgaagaagtcatgtgtttcttacacattgaagtgtagtgttagcaaatttgcaaactcactacacagactttttttacaaaataggatcatactatttatttgcactattttacctgctttgttccattattaatagacagagaatttttttccactaatattcttgaatatttccacagcttcccattgactgtatatgccaggggtctctaagcatgaccttcttgtagggactccggagtcatattcatagcaaaaactcaaatttcattgactcttacacccatgtgctggtgcatatgactcttacacccatatgctgttgccatcatttttaacttattatttaatatttgggtggtttctaattttttatgttaaaaaattatgtcacaatatctggtaaaatgacatatgcatttaccttttgacacagcaatttcacttctaggaatctaacaaaagatataggagcaaaaatgcaaaatgttgaaacacagtgttattcgttgcaacacatttgtgctagcaaaagactggaaacaactcaagtgtctctcaataatgagctagttggataaactatggtatatgcaaaaaaagtagactgctgtgccactttagaaaggaataaaaatctctctatatactgatatggagttacctcccaggtatattattaaacaaaaagcaaggtggaggaaagtgatttttgtatggtttcatttatctaagaaaggaagcaatacacacacacacacacacacacacacacacacagttacttatatttttaaaattaaaaaccaaaccaatactttaaaaaataattgtctgtagattcagaaggaacagaatggagaacaaagggatagaagtgaacatctctgaacattattagtgttattgatttgactttgaacccatgaaatattttacataattttaaacaaaattaggttttttaatcctttccagaaagatgaaacaggcaatactttttcctattcctcccactaaatacaatcaaaaatcctgaacattgtatataaaacaaacataataattctctgaatataaaacagacataagaattttctgaaaaatggaaaaactatggcagagtggttggggacctcaagacccaaggaataacataggagtcagctccttgggttttctttttgcttcatatatgctgaacctacaactgaagaaattagaaatctggaaacaacaatagacacagatgacaaaaacaaaaaacaaaataaaacaaaatgctctctctagccaaaggagcagaaaagaagcagcctagaaagtcagaaaacttttagacagtaaccacactactccagccaaataccacagaaaaaaagccttgtggtcccactccattaaaggcctgatgaagagtctagactctcaccctcgcaaggaaacccaacatccatgctgagctgatgtcagaaaaggccaagtgtggagtctccttccccactggcctccatcccccaacagtatcagtggaggagtagcaggatcatattctctcagatgtcaactgaggcaaagtggggaacctggaggaagattgtatttgtatcagataaaatagaattcagggaaaataaaattcccagatacagagagagacatcgtaataatgataaaagggttaatccatcaagaagacataccaatcctaaatgtgtgtgcaccaaacaaaaaagctgcaaaatgcatgaagccaaaactgatgggaagcacctcccttaccctaccagagtagtagcagaaaaaaaccatctagaccacaagctctaagtaagattcaaagtctcataatataacacaagttcccgtttcaatttaaaaatcactcatgctgtaaaaaggaaggtcacaaactgcataaaaatgacaatcagatgctaacatcaatatgacagaattacgttagaattatctaacaaatattttaaagtagtcataataaaagtgcttgagtgagaaattacaaacacacttgaaacaaatggagtagaaaagagtctcgacaaagaaataaatgacatagagaagagccaaatggaaattttagaactcaaaaatacaataaccaaattttaactcagtgactgagccaaaaagcataatgaaggagacagaagaaaatatcagtgaagtggaagagaaaataatggaaattatccatttgaacaacagagagaaaaaacagactgaaaaaaataacaccacctcagggacctgtgggattacaacaaaaaacataagatttattttatcagagccttgaaatgagaggagaaagaggatgggactgaaaagtactcaaccaaagagtggctgaaaatgtctctgagttattgagacataaatctacagattcaaagagctgagttcacccaaacaagataaatgcaaaaaattccatacaaagacacatcataattaaatttttggaaactaaagacaaatacaaaaacatacaaaaagaaaaaaaagagagagaacatgctagtacatggggaaagcaattagaataacagtagatttctcatcagaaatcatggagaccagcagaagtggcaatgtgtttttcaagtactgaaagaactgcctacccggaatcctatatccagcaaaaacatactttagtaattaagggaaaagcaagacattggccaatgaaggaaaactaagagaagttgtctctagcagacctactctaaaagaatgtctaaagggagttctataaacagaaaggatgtgagaaaaagtcttggaagagaaaaagagagagagaggagaggtaggaaggagaggaggggaggggagggaaggcaggcagacaagaaacaaaaatatgggtaaattaaaaaggctccccttcttttgagttgtccaaattatgtttgatggttgaagtaaaaattataacactttttatgtggttctaaatgtatgcagaaaaatattaaagacaatgacattaaaagtgaggaagataaaaatacttaaagggagataatgtttctatacttcattcaaattgatgagatgacaacagcaggattctgataagttatgtataaataacacaatacctagagcaaccactaaaaaaaattatacaaagagctgactcttaaaaatactacagataaaaatgaattctaaagaaaagttcaagtaacccacaggaagataggaaaataacagagaagcaaaccgcagaacgaaaacaaacaaaaagcaatggctgaattaatatctaacatttcaataattctattaaatgtaaatgtcctaattataccaatttaaaaatatggcagagatggatttaaaaataagacccagctacatgctttctcaaataaactcacttcaaatataacaatataagcaggttcaaagcaaaaggatgggaaagataaatcacacaaacattgatcaaaggaaagcagtacttatattaatatcagataaaatagactttggaacaaagaaaattaccagagtcagagaaagaagatatataatgataaaatggttaatacaccagaaagaagtagcaactctaaatgtctatacaccaaacaaaggagctgaaaacatcacaagcaaaaactgacagagctgaaaggagaagcacacaaatccacagttatacacagttgggtattttaagttccttctctcaacaattagaaaaatcaacaaggccacagaatagttcaacaacactatccaccagcaagaattaatcaacatttataaagtagttcacccaacaacagaagaatacatattcttttcatctgtctatggaatatatataaaaatagattatgccctggtttataaaacaaacctcagcaaatttgaaagaatttaaattatacagagtgtgctctccaaccacaatggaatcaaatggaaataataacagaaagataaccaaaaaatctccaaacacttggaaactaaacaacacacttctaaataatccatgggctgagcaggaagtcttagaagaaataaaagcaaaaatacattgaactgattaaaataaaaatacaacataacagaagtgacagaacacagctaaagcagtgctgagagggaaattcattgtattaagtgtgtacattagaaaagaagaaatttcttagttcaataatctaagctctcacctcgagaacctagaaaagagcaaaataaacccaaagcaagcaaaatgaaggaagtaataaagagtagaaataaacgaaattgaaaacagaaaaaccacagagaaaatcaacaaaacaaaatctttctttggaaggattaataaaattgacaaacttctagcaaaaccagcaaattagaaagagaaaaaaatacaaattaccaatatcaagactaaaagagataatatcaccacaaagcctgctgacatcaaaagaataatagggaaatataatactgtgaacaactttatacatgtaaatttgacaactgaaacaaaatggatcaattccttaaaaacacaagttaccataactcacccaatatgaaaaagataatgtaaatagccctatactgattaagaactatgaatttgtaattttaaagctcccaaaaaggaaatctccaggcccagatggtgtcactgctgaattctatcaaacgtttaaagaagattagcaccattctatacaatcttttccagaaaatacaaaagcagaacacttcttaatttatattatgaagttagtgttacctcgataacaaaagtaaatgactgtgcaaatagaaaaaaaaacaaagctacatgaatatagatgcaaaaatccttcacaaacattagcaaatagaattctgccatatataaaaagagttacacaaaaccacatgtggtttatttcatgaatgcaagacttgttcaatattagaaaatcaaccaatgtaatccaccattttagcaggctcaaaaataaaatcatatgatgatattatttctctgtacaagcagtatacatgtacagacaattacacaatgctgatgaaataaatcaaaataaatggggatatgtaccatgttcatgaaatagaagatttaatataataaagaagtctattctcaaactgatatacaggtttaatgcaattctatcaaaagcccagaatgttttttgtctgtatatatagacaatattgttccaaaatttattttgaaaacaaaggatctagcatagctaaaatggttttggaaagggggaataaaatggaagaaatcagtctacccactatcaagacttactatgttaccatggttatcaaggctgggtggtcctggcaaaggaaaagacatatagatgaagggaacacaaaagagaacacagaaatagacccacacaaaatacccaacaaattttttacaaaggcacaaaagcaacttaatgaaggaaagatagagcctttttaaccaatggtgctggagcaattgtacgtccataggttaaaaaaaaatgaaacttgatctatgtttcacactttataaaataattaactcaaattgatcactggcttaaatgtaaaactctaaaacttctagtagaaaacattggagaaaatcttcagcatctaagactaggcaaagagttcttagacttgacacaaaaagcatgatccctaaatggaaaatttgattaaaatgcacttcaccaaaattaaaaggttttgcttttcaaaagaccatggtaagagagtaaaaagcaagctacacaccaacagaaaatatttgcaatcacgtatctgacaaaggactagtatctagactagagaaaactctaaacactcaacaatttaaaaaatttttaaacaacaattcaactagaaaataggcaaaataaaaaaaacatgaatagacatttcaccacaggggaaatatagatgctaaataaacacaagaaaagttatcatcattagccattagggaaatgcagattaaagccacaatggatattgctacccacatgccaaaatgtcttttgagtgacatcaccaaatgctaatgaggatgcagagaaattagatcacttttacactgttggtaggaaattaaaacggtaagccattctgaaaaacagtttggcaatttcttaaataactaaatatgcaaataccatctaacacaacaattgcaacacctgggcacgtatctcagagaaatgaaaacttaggttcacagaagaacctttacacaaatgcttagctttattcacgatagccaaaaactggaaacaacctagatgtccttcagtgagtgaatcattaggcaaaccgtggtccgtccgtgctatagaatactacgcagcaatgaaaagcaacagcttgaatcatgttcctgagaatgatgcttaggggaaaaagccaatcccaaaaagttacagactatgtgattccatttatttaacattcttgaaatgataaaattatagaaatagagaacagattggtggttgccaggggttaaggagtgatttgggaggaaatagttgtggctataaaagagcaacataagacatcctcctggtgaaggaagttttctgtattctgcctatagcaatgtcaacattctgattctgacagagtactgtagtttggcatggtgttaccattgggggaaactgggtaaagggtacatgggatctctctgtactatttcttacaactgtacatggatttccaattatcacaaaataaaaagattgatttttttaaaataaagatcaaggtaaccaaatagttaacgatgggaaactcctctttaagaactattccggctaatgagttaagaaggggtgatagaatataaccatgttgcagccttaataaaataatagatctagattagattttattccttgagaccaatgggccttctggtcatctgaagagtatggaccccctctaaaaataatgaaatgaagtaaaatgaaatacgtaagttacaaactcttgaagtatgattatcaaaatatttcacaaaaaacaaatttgtgacataacaatagatgtgcatccttatgtacttatcaataacaaattctagtggagggtttaataattttaaagtggagaggagcacaaattatatttcaagatgcctgcaatagctataatgctatatggaaatatctgtgacttctactggtgacatagtcgcaggatatgcaagatacagaggaacatgttaaatggcacaaaaacaatacaatcagcaaaatcaagtctgtgggaaacccaacggtgcaattcatccagccccttcaacaaattccaagggaaaaagagagtgggggaggaaaacagagattaaaagagatgagatgcatcaaccagttgccaagggtggactttatctcattcaaacaaaagaaaaaaagaaagattatgagacaagtaggagaaattaaatatcaactgaatatttgacaatattaaggaatttttgtttattttaaagtgagataaaggtattgtgacttgctttcttaaggagcccttatcttttagagatgccttctgaattattgatggatgaaataatgcgatatctgagacctgcttccaatcacctgggagagaggaggggacccaggagttgacaaccattgaagctgagtaacagggtacaggagtccatttttctgttcatgctacttttacgcaatttttcacttttctataataaaaagccaaaaacaaacctgtaatgagcatcattgtatgtgaatctttgttttcatccaggattaattacctacagacatttcctaatagtggaattgtgggttttaaggatgtgaacatcttaaagtttttgaaatgcattgcttgagtgagctagtggaacagggaaaaatagagtagctcaaggactctcctagcaggaaacaagggaacttaaaaaaaaaaaaaaaaaaaaaaagacatggtctggctctgtcccgcacgctggtgtgcagtggcacaatcatagctcattgcagcctcgaactcctgggctcaagcaatccctcccacctcagcctcctgagtagctgggactacaggcacatgataatttttttttattttttgtagcgacgggatctcactatgttacccaggatggtttcaaactcctggcctcaagtgattcttccacctcagcctcccaaagtgctagggttacaggcatgagccaggaatgtttctagaggtaaggcttgtcttcctccaccctacctctcctcctctttgcccagatgtacccttcctctatggaagaaaccaaattttagccagcactcaaatcctggttctcactattcaaatttctctgtctctggcacccatctgctggatgtaaaatcatgtattcacctaattttggtggtgggatatctgcattttgtctgtttctttcttttatacaagatgttgtaacaacacatctgtagtaaattgctgcggtcatttattattacgtccttgggataaattcctagaagaatctacccaggtcaaaagaaagtgtattttgccctcctagaaactgtttctggttaatcccatcagtgcccagtggctggttcctggcttttaccaggtaccatcaaatttacctgcttaagaccttcagccagagatgggtcaaatttacaaacaaacatcagccaatttggtgggttaaaataaggtcaccttggggcaggcacagtggctcacggctgtaatcccaacaccttgggaggccaaggtgggaggatcgcttgaggccaagagttcaagactgacctgggcaacatggagagacccctctctacaaaagaaacttttaaaacttagttaggtatggaggcacgttcctgtagtcccagctactcaggaggctgagatgggaggatcacttaagcccaggaggttgaggctgcagtgagctttgatgatcactattacacttcagcccctctgtctcttaaaaaaaattttaaataaggtcatcttgctgctaacatgagcatctttttattactagggggttgaatgctgtaatctggtcaactgtcaggagcaagtttaattccttggactcccttggaaaatgagatctggcattaaactttcttagaagaacgggtgttcagcttccaacatgccccacagccaaagctcaggctctccccgagccatgattctcagtgtgaccagaagatgctggcatcagaaccacctgcagagatggcctcttggcaaattccagttcacaggcccatcccagacctacagaatcagagtctctgggagcagagactgggcatccctgtggaattccactaagacccctgacctagagagagctgtgccagttcctcatctttcaaaactgagctggattattcacaatagccaagatttggaatcaacctaagtgtttatcaacagatgaatggaaaaagaaatgtggcacatatatacaatgaaatactattcagccttaaacaaaagatagaaatccagcactttgggaggccgaggcgggcagattacctgaggtcaggagttcaagaccagcctggccaacatggcgaaaccacatctttactaaaaatacaaaaattagccaggagtggtggtgggcacctgtaatcccagctacttgggaggctgaggcaggagaatctcttgaacctgggaggcagaggctgcagtgagccgagatcaagccactgtactccagcctgggtgacagagagagagtccatctcaaaaaaaaaaaaaaaaaaagatagaaatgttgtcatttgcaacaacacatgtgaacttgaaagacgctatgttaagtgaaataaaccaggtacagaaagacaaatatggcatgatgtcacttataggtggaatctaaacaagtagaactcatagaagcagagagtagaatggtggttaccagaggctgggaagatggaaaattagaaagatgttggtcaaaggatataaaatctcagataggaagaatcagttcaagagatctattgggcatcatggtggtgactatagttaataataatatattgaatacttgaaaatcactaagagagtagattttaagtgttctcaccacaaaaaaaaagtactaaatgcataaggtaatgcatatgctaattagcttgatgtagtcattccacaatgtatgcgtatatcagaacatcatgttgtgcaccatacagatatacaatttgtatttatcaatttttttttaaactggtctggtcagcagttgaaattctttcttaggaggcaccagaaacgcctgctgaatgaaccaatgatgaatgaatgaataaatgaaggaaggaagaaaggaataaattgcttaattaactgaccaatgaattcatgaatgaacagatgagcaaacgtgtcaataaatgaaaagacgagtgagtgggtgggttaataagtgagtgcctatgtgcagaaaaggagtgttggtatctggctttttatagataccatcaaatttacaaacaaacatcagccaatttggtgggttaaaataatgtcaccttggtcccggcatggtggctcacgcctgtaatcccagcactttggaaggccgaggcaggaggatcacatgagtccaagagttcgagactgacctgggcaacatagagagaccccctctctaccaaaaaaaaaaaaatttaaacttagccaggtggggaattgggggacacagcagagaaggaagcctgccagcctgctttgctgtccttctgccacccaggttgcacacagccttaggaggaagagacacaatcaacttcccacacccacctcccaggacagcgcatcccaggacaggagcaccgaactgcccccatgatgacctccccagacagaaaataacagattttatgctttctacacattttttcaaagaatttttatatgtgccctctacctacaaacaaaataattatttgtgggaagaggaagcctttcagcatctgaaagaaaaccacacaagctgctgggtaaatgaacacttgccttctgagtaagcagaatgtgttttggaaatctccagcagtgaccagggatgtgcacagcttgagaagtggaagctcttttttccctcttcgcctctctctccttcctccccttcccaccttttctttcttatcctctcttctgctctcaaatccttttcctaagaaggggtagggtcccaaggagcagtggagaaaaagaaagcagctcaccacacccctgcactctgcaccggctggtgtctctgcctcggtcctaccagtcacataatttgcaggaacaatccctgcactgccttgcaccactgcccctctctaccagtccttgcccataggtcagaggaacaagagtggtccacaggtgctgcacaaagacctccgttctgaggtctgtactatctggctcaagctgtgctcaaactttgtccccagcttcttgggagatccacaggcaactggggttagacaagacctctaattcagaactcaagcctcagctgctggagacaatgtactttcacaagtcaggggatgggccaccagccaggggcacagatgggacacattgctatactggagtgatgcttcatctttgcaacaggacacacccaaccctaggctaggggagaattttctccagaggaaacccaggaattactaattatcattacttgtttttatactttttttttttttttctgagacagagtctcgctctgtcacccaggctggagtgcaatggcgagatctccactcactgcaagctccgcctcccgggttcacgccattcacctgcctcagcctcccaagtagctgggactacaggcacctgccaccacgcccggctaattttttgtatttttagtagagatggggtttcttcgtgttagccaggatggtctcgatctcctgacctcatgatccgcccacctcagcctcccaaagtcctgggattagaggcgtgagtcactgcgcccggcctctacaatattattgtaaatagatgacccaaaatgtgggcaggtttttccaaggggtttctgctctgacagccttctagaatacccctcccagcctggccacacacctggggcctctgaaccctggcaaggcagggaatgttcaggactgggaactctgttgattttatttctattttaatagtctgagcattgccacctttgtatattacattttctaattttgtaattctatggctaagaaactgtggttacacctgtggctgtccccatggcagaaggcaagccagggcggcaaagatacagactttcccccttcaggccccagcctgcagctcgcatctcagctaaattgccactggttcccggcctctctctgtcttccagccagtcctgtttcttcaccttcacggaacacgatcgggccgggtttctcttctctccaatgttacttcaacttctcgtcataaaatggaatgattccagtgtttatgctgttagctacatttatctttaagagcaagatgttgagtttagctttaatgatgaaaaaagcctttcaaaggataactcattgaaactcattatgcactataaggccactatttaaagattcggtaattccagtgatgatctttttaaagcagatttatagcagaaaatagttacattctttgacttcagttataattttctattttgtaatttaatactcctttagtttatatttgcacattaaaaatatagcatctaaaagtccatcattaaatacttttaataagtgcaataaataagttttacagtgtgcataaatctaaaaacaaaacccaacataaattgttaatcttacactttttctcattaattgcaatacataaacatatgttttatacaaagatatttgctacgaaataagtataataaatacagtttaccacatgtattaatcttaatagttacaaactgttaatcttatatattaggtaataatttgcaataaataattgtttattatcttgatgtttgcttgtcttgggttctagcaatatgcaataaagaaatgcaattttgaataatttgattgtaagactgctgggaaaatactgtatgttataattagctgggagaggattctagtcacaaaagcaagcatggagacagggttcaataacccaaacatacgttattgagtccataaataattttaaaagttaagttcagtttcaaacaaaacagaattttttaaccttaaatgcaattaaagaaacatttcacattctttagtgctttcattattatacattcaaaaggagatgaagaaagctggaagccccatcaaaactgccagcctccaagctgagacgggaacatggctgcctttgggagaaagagtggcctgacagctcatgcccatcagccaagggctccccttggcctggaatacaccctccggaacagccagcaggtgcacccacaaacgcagcaccctccatacctcaccttcaagctggcacttgctgaactgcacacacatttttctaagagaggttgtcacctatactgagcttaatagaaattgttaatcttatatgtaaaggtaataatttgtcataaataattgttcattatctgggcctttgcttgtcttggagttgagctgtatgcaataaagcagtgcaattttgagtaattcgattgtaaggctgctggggaaacatggtggattgtaatgagcctaggaagggtcccgtgggccagagaccccaaagaaccaacctaccagctctggcacatgcaaagcccaggtcctcaccagcaattgcacaggttctttaaatagtctctccaagacagagagtgaaccagtttccccttctcatgtttctgccagagtaaacatcacttagaggaaaccagtcctagacgaagtgaacctcggtccctgggaaaggctgaggtggccccagggcaatttagtcccaccaagccggctgattggcaccaaaggctcacctgtctgcctggaacaggtagggccagggggtcacttcctccaaagtgaccctgacactgctcccggcagcagcagcatcctggcacatccctgcaggcagagagctagagcagtcctggctaagaggtggctgtgaggccagggagcaaggaccctgtgcactttggcttcctagaatcccacgggcacaaagacccacttcaaggaaacctcccccaagctgggaaaggaagggagggagggtgggaaggaagaagggagggaaggaaaaagagaaggaaataaagaagaagggaaggaggaggagaaagacagaggaagaatgaattttaaaaaaagagaaagaaagagaaaagaggaggagaaagggagggaaagagagaggaagaatgaatgaaaaaaagagaaagaaagtgagaaagagagaaaagagggggaggaagggagagaagagagaaagaaagcaaggaaggagggagggaggaaggatggaggaaaacagaaagaagagcaagggaggagagagggaaggaagaagggaagaaaaaagagagaaaaaggaaagaaggaaggaggaagggattaaaggagggtagaaggaaggatagagggaaggagggagggaagcgggaaggaaggagaaaaaaagggagaggaagaaagagaggatggaaggaaggaaggaaaaagaaagaaagaagggagaatcctagatccattataaccatgaacagctcttcctaatataaagatgatcagcaccccacaaaaacacacacatacatgccctgacgtgcatccaatgacatgagtctccatatcaaagcccacttgcagtgtgttcctggcagtcgctgcggtttgtggttttaatatctcgcttcttctacgctcctggcacctgctagagtgggcctggcttcccctctttaggcacagctcacaccgggagggtaagcccccagcctgctctctgcctaggctgggcacggcacagtccacagcctgggagggagccgttcatcagggtgacataacggttcagttccagaagaaagttcctgcctagggctgagcttcaggcagggtaggttcccaggagcaagtgctgtgagcctgaggccccaggcgtctgaagacaccacaggtctccccctcgtctcctccatcccagcaagcacctgcggtccaatcgcgctaagccaggggccctgctttcagccgggttggaaagggatagaagctcccccatctcctgcccttttctaaagacaggcagctccagcaaaaccctcagccctcaggcgtccctttcgtggggtccccgcccctgttctggaaatgagaccccaggtcccaggatgcagctggcatcgcaggggaagggacttgcccccaccctccacccgctaccatgacccgggagaggccttcccgagggtctgaaggtccgcagagccctgccccaccctagtccaacaaggggaccgcgttttagggacatccctggattgtcaagaaacgctggctcatccggacccccggggagcgcagcatgaacccaggagcaccctgacaccccgaaaacagggaacctggggcccttctcaaactcaaggggaaggaaagggagcctgccaagttctgcttctgcgaggcagctgccaccaaaacccgctccgagggccccgccgggccgccctggcagctggaaaagcgcattcctgctcgcccgaggatgcagaaggcaaccgagtccccgggcggcggcggggcaactgcggaaatcacgcagccagatgaagctcataaatttcccctatgaacaattgttttcatttccctcccatgccactagatattataagtggaaagcaaaacacaagtaaatatgttcattccgctcttgcgatcggtgataaaccggaggcggccgaggccgacagaggtcagcaggccgctcgccacgggtctgcgagcggacactgccaccctccggccgcgcgcgggactgcaccggccccaccgcccggctctcccgcccgctcgctgcccgccaatgttcgctttgcgcccttcgctcaatgtgcgtgcaaattacagggacattcgaaaggacagagagctcccatatttaaaataatcatttttgttcatcataacctctcttccagagataaccgctcttattaacgttttcgtacaattatctccagtctttatgtgcattctacgatgtcttctgtgtacctatgaaatacaaagcttttcctacaatattaaaccttgatttcctaggtatcacttaaacgaaagttattgtcacacaagatagcctcacagatatctttttaggggctgtgtaatatttcaacttgggactgcaccaaaagttactgaaccatctcccaattgctcatttaaagagtttctaatgttttcatccttgtgcataatgctataactgaaacctctattcagaaacttttgtttatattgttaagatccatcaataaaggcagaattattaaatgaaaagaaattaactttttttttaatggattctggctccatgccccaggctggagtgcagtggagcaatctcggctcactgcaacattcgcctccctggctcaagcaattcccctgcctcagccccctcagtagctgggactacaggcacgcaccaccacacccgactaatttttgtattgttagtagagacggggtttcactgtgttagccaggttggtctcgaactcctgacctcaggtgatctgcccatctcagtctcccaaagtgctcggattacaggtgtgagccactgcgcccagctgagaattaacatttttaaagctcttagtagcattactattttctagatgtataatacctatgtggagaatattatttaaaatgatgagtgaatataaaatagtgctcaaatgagtggtcagaaaaactgtatcaccaacatatcagtccccactcatctcatctttcacttgaatgcaaggccaataaaaattccatcaaagcttttttgatattttgtcacattgattccaaattccatgtgaaagagtaaataaggaaaaatctccaaaaaacatgtttgtgaaaaaagagaggagacttcctcaacaaagatattaacatatatcacagaaagctacaataatttaaacagtgaagcacaaaatagagagcacaaaagggagcaaataggcaataacttacattttaacataaagccattttatatcagtgggaaaaggatggctgattgatgaagttataggtacaatctgccactcattcagaaaacaagaaaagttagtgtcctacctcataccacatattcaaatgaatgctataaggattaaagatttaaatttttaagtgaaactataaaagtgatatttacatatatggtaatagagaagttctaagtccaattgcaaaggcagaagctaaaaactttaaaatgcccagatttgaggtgcacaaatttaaaatacccacatgtgaaaaatataattttgaaattgaaaggtaaaccaacactaggagaaaaaaacactttcaatatacataacagaaagaaggttaatgccccaggtgtgtagagctttctcacaaatgaagaacagacaaatacttcaatagaattggggacatgaatagcaattcaccaaaagaaatacaaatgatagacatataaaagatgtttagtcttattaataatcaaaagacatgcaaattaaaacaaaaatgagaaaattttgtccctatattgataaacacaaaaacaatgattgtattgtcaaggatggataaacgaatcctttcaacaccacaggtgatagggtaaatcaggtaactggtaaactttataaagggtaatttcacaatatgatcaaaattcttacaacacgtgacccaaagattctacttccaaaggaatctatcatgggtatgtacaaagattcacctgtaagattgttcattgctatcagaaacaaaccaaatgtccaacaataggcaaccagattttacatagattatataatatcataagataatacaatcaagtcctcaatagtaatgttgtagaaattaacatttaaggatgtcttaacatttaatattcaagaaggtctcataaaatactgctttatagcaaaaagcaagttacattgtaaccatgctttctacacacataggaaaaaaaaacctataaggtattcctttaaataataataatggcaggtggactacaagtaatttttaatattcttttggctgctttaatattcttttttctttatatatttaacaattttttatcaattgtttagaagaaaaatagttttagtggttttctagaaatattgtattttacgttcccaccagcattacttgagagtgtttgttcaggccaggcaaagggggctcatgcctgtaatcccagcactgtgggaggccaaagcgggaggatcacatgaggccaggagttcgagaccagcctccattctaccaaaaaaaaagtaaagaaaaaaaaagacaatgctcattcatttgctcattttttaaatccaatactctcaaaacacacattcagagcaaagcacgttcaagcctggcaacagctgtaaacaagacaaagccctgcccttgtagagcagtcgataagctccacggttaggaaaactgaaaaggaacaaaccaagaaagcagccccgtggggatgttccatggcctgctgtggagggaagcagggcgagggtcaccgaccggctggggaaggagctatgctagggaggggttccgggagggccactcagaggaggtgacggtgaggagacctgagtgtggtgagcagcgagtcacctgtgaatctgggacaagcatttccccgcagagggaacagccgaggcgaaggcccgaggaggggaggggcttggtgtgcctgcggaacagttgcgcggagccccgtgtggctgaaaaggagaaggcgaaggagaggcgtaggggaggggacaggtggcaagagcccagagaaccttctggggcacaggagggagtgtggattttcttttgtgtatgatgggagccgttggagactttgtgcgtgagagcgacgagacctgatttcattttcccaggatatcgccagctcccggttgagaatggaacccagtgtgccagaactgcagcagggaggccgattcaggaggtcactgcacgagctgtgcctggcctggagtggcctggtgcggggaacctggcggcactggcggttcacacttgctaactgagtaagcaaccgtcgtgggggtggaatcttgatgtgtttcttttctgagccccttgtcagctggaatgctctggtagctcatccctcaggagatctggatgtccctgaaaatagagaatcaggctaaggggattgccctcaggatacaccaccccccattctccccagcccagaaatcatcttgtgcattggccttgagtccaaccaaaacgctggacagtcagtggctaaacaaagaaagaagagcgttctgttgaatcatgatcgtcatctacactttcaggagctttcatgtccaccttcacaggtgtcagcatagaaatcacacttctcccaaaaatgcacatgcaaagttttcctgcatccaatgcaccatgtcatggaaggaagcacaaaatctatgtggtcttacacatttttttcagggtttggagattaactaatagatttccaggatttatttcctcctgggttctaatgtcatcccactatatttatatgggaggaaaatgatgtctttcctcctcaatcattttaaagtcattatcatctcttgcatgataaaaattaatcaaactattttcttaagataattcttataaaattgaggtgcctattacaggcctgcacatcttatgtcccagaaattacactcatctttgcctctcctgtttccatagtcccatttcttccagtattaactatttttttctttaatgagacagggtctttgtctgttgcccaggctggagtgcagtgatgtgattgatcacagctcactacagcctcgaccttctgggctcaagccatcctcctgccttagcctcccaagtacctgggatcacaggtgcatgccaccacacctagctacattttttttatttttattttttgtagagaagggggtctcattacgttgcctaggctggtctcaaacactcaagtgatccttccatcttggcctcccaaagtgccgggattacaggcgtgagccacgctacccagcccataatcccattttaccatgcacttggtccccagtttctcaagagatctgtgtctgcccttgcccagtccctcccttggggaagttgcttctttgtagccagaaaaagcccttggggtggtggaggatggaggaactgtgggctgggccctgaggacacagtccgaggcaggtcctgtgccatctgggggctgagacactggggtcaaatatgtcagaggtaaattcgcaacttccattatccttgcccaaacctggagggggctgctctgtgtgcaccagggggaccataggctcaggatggggctcttctgtgcaaggcaatttggggattcagccggtgtcctaatgcctggggtgccacctggatgaatgaatacaaaggcaccagaggaggaggtacttgtgtggatagaggtatctgggactccaggtgggggtcactgaactgaaaacccatctgtcccaagtaaggcatgtgataagagaagggcatctccaaaagaataccttgggcacggtgctactgcaaaagctaactcaagactccccccgcccctagtattggcatggaaaagtctccatgccagcaagtgatacccagcacggaccaaggacatcttagtaccagcagtctctgacacacatgccagaccaccaaggtatcacaactggccacagcccatcccagagacagccgcaccacagcaaggcagccacagcataaagtcggaaggtccttccaccccgactgctgcaacaaaggcacttgcttacaggaagcagtgagaacatacatggttacacatacggacacgcacatcggtgagcatctctcctctggacttgaatgcctctgctctgcgctggcactcagcgtgatacctggcacttggtaggcacttaatgagtgttttctaaatataggaaggaacagggggaatggaaggactgtgtagacatcgtccagtggcttgtttctctaccagtttcatatccagaaagcagcatggcatttcagggtggcgctcaggccatgctgtcagtttcataccgagcatcagctgtgggggaaaagaaggacacgcatgcccagggggctgggtggttttacctccgttaaaaaaaatcaccttccaagagacactccccaagttctgccgaggaaggacacagcacaggggatccacctgccttcaaggcgaccaaaggagcagatgccagcaggcttgaagcagagcccttggcaggcaggtaaagttggacaaaccctggtctctgttgccccatctgtaagatggcactaattacctaagcttgtccccagactctaatgacataatgagcatgaaagcccctcattaggggggcgaaaggcatcgttatcccatgtttaaaggacgtcatttgccactgggcagagcagaggaagaggaacaggaaggagccagaagcctgatgctcttggcccatcgcctatcagcatcacatctgagcctgggatctccagccctgggctcctgcctctcctcacgggacccagagctgcctggagggcaagaccccagtgagtgctcagagcaaaggagccactgaagacactcagactggcagccctatgtgtaagggtgtgactgccttttacccggtgcaaggagcaaggacatggtgggtggaaagtgggcagtgaggcctctccatttcaaaaggcttcccccagtggccggaacggaaccccatggagggcctctccatgctcttcatcagagagcagacatctccaccaccaccagacatagaaatcgtctccaacaaaagctgctcaattccctccatctcggaacagagtggcaaaggcatgagagttgctacacattcggaggtagacaagcacatctaataaacacagagacaatctgcccatttttggacccctgcattagattcccaagcagatgctccaccacactcaggctgcaagattagtgtgggagggactggaggaagggctcagacacccagacccgctctctccccaccaggctgcgcgtctaggaattgtctgtgtcacgttgctgctgtcaccaagggagggcccacggggatgagatcctgccccaaaagcaagccctgcctatgttaaagacagagcctgcatgagtcaaatccgactcctgcatcccatggtctgtttgggaggctgccctgtccccaccaagggtgccttctcagtcaccttcaccgcactcaggcttaccctagcacactttaaaccaggaacgctctcccttgagctatctttttttttttttttttttgagatagagtctcgctctgtcacccagactggagtgcagtggcacgatctcggctcacttcaagctccgcctcctgggttcacaccattctcctgcctcagcctcctgagtagctgggactacaggctcccgtcaccacgcccggctaattttttgtatttttagtagagacggggtttcaccgtgttagccaggatggtctcaatctcctgacctcatgatccgcctgcctcagcctcccaaagtgctcggctcttgagctatcttttaagggacctgaggatgaaacagtgaaactggagactggcaggtgttcactgtcagtctggggaaagcagatccaagcagccatgagaaaaccccggaagcagtcagagaggaatcaaagtcctaccggtgtcatgtggccccaacagagccccggagagagccaactgagcagaggcctgtgtggctgggcaggcaggggacatgtcctggagggagcaagccttgaacttgtggtctgtagaacttgcccttctgacccaagggtggccgtagaggaatgttaaatcagcacccccagccctggaccacgcctgatggcctggaggagtctgcttaacctctccaagctgccccttggagaatataagatcacgaacctggacctcgtcccacccaggagacgccatgaggaacacagtccccacagttcacaggaagttgcagaccggaggtgaaagagcattttgctggaaggtaatgaggtatgttaaccaccctgaaagttaggggattcacccagcctccagttctagacagctctcacctcacattgagcaccaaaaaactcaacaatcaaggtaagtgcaatctctttaaaaatcacaatgaatgcatttttcaaaatccataatgagcaagattatcaaaattttaaatcaagacaagctgtgaccttgctacctcactcagcacgacctggccatttcacactctcataggacagagtactccatcctcatttcactcaccaccattgtcattaaatattcatcggagggatggttggattcgtttttgcccctgcaagggcgagggtggcatgcttcactagtctgtgtacctggcacctagctcagagcttggcacatggaaaagtggtgcccaggaaatacccaaatgaacatcgtagatggaagttaatcctgaatgctgtgctgagagctcttctctgctcagatgccacggcgggcttctgctcctagccctgggggactctccacccgaccctatcgctgccactgtacaagctcctaccttcccaaatgtagaagccagatctgggtgtgtgtgtgtttgtttgtttgtttgtttgtttgtttgtttgtttttgagacagggtttcattcctgtcgtccaggctggaatacagtggcacaatctcggctcactacaacctctgcctcctgggttcaagccattctcctgcctcagcctctcctgctcaagccagctgggattatacgtgcccaccaccatgtcctggctaaattttgtatttttagtagtagagatggggtttcgccatgttggctaggctggtctcaaactcctggccttaagtgatccatctgccttggcctcccaaagggctagaattacaggcgtgagccactgcacctggcccagacctgggttctaatgacccctttgctttcatttgtgaaaagatactttcagtgcagagctgatgggatgcagtgcagacacaaacaatccggcaggtcccaggacaatgtgtgactgattttctgcacctcctggacttgtctccacctcacacaagggccaccgccaaatggctgtgggagggtgtgtcctgccgttttgggcacttgggcggctgggcttccgcccccaggagccatgttggatccattccaagacagtcactctctgtccacttcttcacagagaacatctctatattgaggaagtttaatttgaggccagcaggaatcatagtgtatgggtttgcctgaaacaggctcacatgcaggcaatggctaaataaaaatctccaaatagccatgccctatttttgcatttttatgagttctttgaaaggaaaaaagaaggggtgaggaagaaattaagaaatacaaggctgagcacagtggctaacgcctgtcatctcagagcattgggaggatggtggggaggatggcttgaggccaggagttcaagatcagcctgggtaacatagtgagaccccatctttagaaaataaaaagaaaaataaaatctttacagaaagaactacaagatgtttccctgtccttacctgatctcccagttgcagggcacctaggaagggaggggaaagtgcagggggcctcctgcatgggcagccaggtcatgggtcctgccaacagcctctgcccagctcctcttctataagtggaccttggccctgtcctccgtatgcacctgttctgtctcctctgacttggagagacagctttgcctttctgcctcagaagatggaaaaaggagggaagtaccccaagatgtcaccattcactcccccagctcctgggaagatgcccagctaagaggtgcccaatgccagcaggcccagcactgccagctcccagggacccaggccaagccagagactggcctgggctcattgtagaggagaaatggatgaggagagagaagcaacatgcggttttaattctttgttaaaaacttggctgggcactgtggctcacgcctgtgagcactttgggaggccaaggcgggcagatcacttgaggtctggagtttgagaccagcctggccaacatggcaaaaccctgtctctactaaaagtacaaaaattagccaggtgtggtggcggacgtctgtagtcccagctactcaggaagctgaggaagaagaatcgcttgaacccaggaggcggaggttgcagtgagccaagatcacgccactgcaccccagcctgggtgacagagtgagactgtatctcaaaaaaaaaaaaaaaaaaaaaaatcataaaccctaccaaagggtcaatctctctttcagaaaggacattaggtgctgttttcctgctggaagccccataagtctccacgtctcctcaatatacaattcaaaaaagcctccaaattgccgctgctgtcatgctaagcattggaaagttctgcttgaccttttattaacatttttctaaaccaatatgtttggtgtggtggttttgtcttttttttttctttttttttctttttttttttttttttttttgctacaagcaccctgaggacttatgaaaaatacttttttctgtagtttatcccatatgcagttaataggctcacaaatataataccattataaaaaagaaaaactgccaactctgctaaaaaaattgtcataacactaaattattatataaatataaaaggagtgtgtctgtaaaatattcactcaatgaacatcccaaggtgatggttttgctatgttgtttttattcctgagagatccataacacactcgaatatgccacatgtcaccacatgaatcaggcagttaatacatgtgctttttagaagcacggatgtcttcctgatagaatgtgctataaaaaaatgtggagatccggctgctttgtctgataggcataatttaatgtctggcttataatactgcatcttaaggaaaaatacccactgtcctatgtagttatttacaatatattgctaagtctatgcaaatatgtttccccgagcctgggattatataacaaaggtcaacaatgtttgaaatattttgaagcatattcccaatatgcgtagtgtatggtgctaatatccaatatatgcacatatatcttaatatatttccagatctttctgttcattgttctctccgtagcttcccacagaatactattagagaaatgttttcttctgagtaaagccaaacgttgcctatccatcttggaaaaatttattaaggtggctaattatgcggtccttaatattgcattagtaggaaggttgctcaatgccactgcggaagagaaaaagatagaagccagttcaataatactgaaaccagagacgcaatacgtgcaaaaatcagcacacacctatgtcatcctatttttctgccccagatttccaaatcaggcaattccacttagggatcacatgtgtgcctatgcacccacacgcacacacacacgcacacacatgcttgtgatctggtgtgcacaaaaccaacattacaagccacacattctgcttctcccttccaaatattgcagattttgcccttatttttctgaattttgtgatcacctgtgcctttcattcaaatcgcttccttcaagagaaaaagaaatggtttggctaattgcacaagagtaggggagagggttgtggaaaccagacctgcgctatccaagccacatccagaaaatagcataaaagagagatttgtttacatcaaaggtatatgaaatctgagccctcaattctgtcccccatttcaaattatattgttcctctatcattctccagtcactgggttgaaccaaattgggaagactacagtaaaacagacaccaaaacaagagactgaggtcattagaaagaggccgatccccagaaaagatactcttccctggtatgtggaccaggctggactttgcatgtggcttttcatatctgtgctgctgtgacactgtgtagctgtcccaaactctggtccacaacatcacccagaggttgactctggcagcttcagactgccttggtattttgggtcctcgaaaaccccaaggctaaaaatccttccagccaatccatgttttaagacgctacaaaaatcacccattttcaaggactaatggagtatgtctagatgtggctatggaactgatgtatttttttagaatctttttccgtgttatcagtccaaccagccacacagcccacctgatgaggatttttaaaaagagccaaagctgtgaaacctctctcgccagcagaaatgagttatctagaagcttcttgaacagaattctctcaggaggcgagattaagtctgtaatcccagcactttgggaggccaaggcaggaggattgcttgaggccaggagttcaagaccagcctgggcaacccatctctacaaaaaaaaaaaaaattaattaaaaaaatgagttatctcaggaaggcaatcagacacacaatgcaagcctcctcatgagaaagtcagctctgcagtttccccagaagagaatgtcattaccagaaattcacacccataatccccgcactttggaaggccaaggatggtgaatcacttgagcccaggagttcaagaccagcctgggcgacatagtgactgagacaccatctctttaaaaaaaaaaaaaaaattaatgaccttcttgcttgactctggccatggggtttcctgaacccccatgatgatcccacaaagtgtgggggaagtgggaaaatagaacaacacacatgtatgctcaagacagctcctatttcctcctaagccataaactgcttcatagaaccttccagaaggttttgaggaagggttttcacaagggccgagagagctgcgagcatctttgttctcccactggaaactcaactgtatataagacacagcaaatgttaaatcatttaaagagagctatttttcatagtttccagtacataaatgtgtttcagtacatgttattgtaaaatagtgttcctacttacgttcttatacatctgttgttgtgtttactcatcctttcgttctgacttttagaaatagcaataaatctattttttaatcccctctgctgatgactgattattcattgctaaaaggggtggaaggaggtccatgtgaagagtgatccgccctccagcacaagctccactttcacaagataaacagggtccagggagattcctctttcgtcctgggtagtttatgcaaactaaataaggacttggtggcagctcaaacaaatataaattaccctccagtggaaactccaaccacttgttacagtcaatttcagtaaggaggagccaagggtgacatctacacaaacaatacaattcatttctatactgcatccctaatacaaagattgcaaagggcttcgcgggagtcagtcatcactgatctaaaccaaacagggtgggaagccaagaaggcagaaggaggagaagaggaactgctgcttctggaccctgggaagaatcccagctgtaattggaatcccaccaaagcaagtgcctacagctgtgtaaatcaggataaggcaggctcgcactgctgcaacaaacagtcccaaaatctcagtagtttgatacaagtgttaatttatttctttatttttttttaagtttttagagacagggttctgtcgcccaggctggagggtagtggcttaatcatggctcactgcagcctcaacctcctgggctcaagcagtcctcctgcctcagcctcccaagtagctggaattaacaagcacatactgccacacccagctaatttttttttcttttttttgtagagatggggtctccctctgtttcccaggctgatctcacactcctgagttcaagcaatcctcctgccttgaccactcaaagtgctgagattacaggagtgagccactgtgcccagccacagtgttaatttcttgtgctgagggtctggaagactcacaagggcagctgcctcacactccatgtgtctcaatgatcaggctgtattgttctgcagctcctgtatctcaacacaaggcgtctgtggttgcccaggcagaggaagtgaaagaaagccatagttagtcacacacaggctcttctatgctttcacctggaagcactcttttgaccagaataaggcacatcttcctatttgcaagggagctgggaaatgtgggagaagagaaggtcatgtctggtgaacatcactaattctaccccaggtgacagacaatttcacagagccactcatcgcatggggattgcagaatacatcacaaaggaccctctaagcactttccctaaaccgtattgtgcagtatgtttgcccctctgtctacaactaaacggtgctttaactgcattccttgggctaagtgatggagcaaacttaatttcctcatctgtaaaatagggataccagtgccagtctaacaggccaccacgaagacctaagactttatgcatctgtaaactgcacatcattaatgcacacatgtgtgttagtggaagtaacaaccatagctactgggctagtatttcagcatgtggggcagggaaaccctggttcaatgcctagaacttagcatccagaatagtcaccgaatggtgacccccatccagttccatttgatgtctaactggctgctttggtgattgcttctgtttttagggcctttcaaatttactctgctttaacatatctgctgatgatatgaatgtctgtacttatgtctaccagttcttaccttagagtactggctgggattttttttttcttttctaagatggagtctcactttgttgcccaggctagaatgcagtggtgctatcttggctcactgcagcctctgcctccacggttcgagcaattttcctgactcagtctcctgagtagctgggattacaggtatgcaccaccatacctatctagtttatgtatttttagtagagatgatggccaggctggtctcaaactcctgacctcaagtgatctgcctgccttggcctcccaaagtggctcacaagtgtgagccactgtgcccggcctactggccgagattttttgatgaactttttaatggcatctctcccagataccttacaatgggattcccttgcaggtgcttccatttgcacttagcccgtggtcaagcttgtttattttgccacactcaaaagtgaattccaatgaatattggaaaaggccacaggatctggttatttttccaatcatataatgctgattttcttgttttgttttgttttgtttttgtttttgttttgttttttgttaaccacatgtattgcaaactcttcttcctaaaaccttcttggcatgtggtcatctctgggtcacatcagaaaggaccaattgcaaacaaaaccaccttgaggctggacaaaaggaaaagaatgagatggactctttcttgctgggttcttttggagatggcgaggcatagcagggtgaaagaaacttggctttgaacttgagtttcaatctcaattctgccatttgtatacgtgcccttaaacagctggtacctgatatagtttagatatttgtctacattggaatctcattttgaaatgtaattcccaatgttggaggtggggccaggtgggaggtgtttcggtcatgggggtggatccctcatgacttggtactgtcctggcaataatgagtgaggtcttgcaagatctaattgtttaagagtgtgtggctcctgccccttctctcctgctcctgcttccaccatgagaggtgcctgccccctcttcgccttctgccatgtttggaagcttcctgaggcctcaccagaaacagatgcaggtgctatgcttcctgtacaacctgcagaacttgagccaattaaacctcttttctttataaattacctagtctcaggtatttctttatagcaatgcaagaacagcctaatacagtgtccggtcttggggcctttcctggaaggagaggagggcggtacagggaggactccataagacaacaggccaaggactatggcttggtgggtactgagcatttggtgaagcctagttctcttactcaagcttcaggtgacacaatcatcacggggcacctgaagtatcataggactgcgccagtggaggagttgtggacaagttggtacaggatgtgcatgcacataaatagtctcctcttcataactttctgttgaaagaaatggagccatctccagcaaggaaccatgagactttctcatggcttgagctgtgacctccagaaacgtcctccaacagagccgtccaacagtggattttcctgcccaacagcccaacacacgagtgcaagtttgatcttcgccacctcctccaatgctatggtaggtgaccccggcagcaggattggaatgattattgaagtcattgcttcattctcagactacaccaaccaatgcccagttcagcttttccccaccagtctcttggctgtttcaaccaaattacaaaaacgtgaagataaaataattagaaatgctcatttgtcactgagaatctggcaagcaaaacctatattttgcaagaagttttaatattgtacttttttgtgctttcctaaactaatttagtctactaattttctataattacctgcatgctcttagcttccgctggtcagatgagttctgagacacttatataaccggcattaaaaagatgcatttagcggctcagatggttaaagtaccaaagcctatagaatccggaggttattgtattctcccacaagtacttaaataatagcctaaaatctgaagaattactttaatactccaataaaaataacccaattcaaaacattttcaaggaaacagagttctttgctctaggctaccgagtaatggctgagaaaaagtatatagcctgtcacttctgattagagaactgtgcctctgtgctttgaatgaggggcatgtctggtaataggaagtgcagatattaaagttaataaaataatgtggaatacgatatatatgaaacttgaccaactagagcacagaatataacatacattaccctgttcagtcaactcctgtggcccggcatctaatgacaagtttaatttctgtttccaatgagagtacagctaaaaatacaatttccagattagacaaatattttatccgactccctaacaaatgtaaccaagaatggctgacgtgtctacacagatgcccagtgaccatgagagggaattactaggattgcaaactgctcagcctcaaaagtccgtgaaaccccatcatctttgaggtcattataaataattagttgcagacgcagagatgttgaggcttcgtcactaggaaagcacaagggtggatccatttctctcctgccctgagaggctccaagctccctctcggcacaattaggcctccccaaaccatccgacatcaaggcccctgaacacccattattgcatctttaatctaaaaccccaacgccaaccataatggtttttgtttttcgatacattaaccttcaacttgtattttcactattaaataaccagcctgagaacctcttagaatttttttttcccagtcacctacaagaaaccatgcagttcccatgacatgaccctcttaagggatttaaaagcaattcaatgagctaatctcagtaaacctagaattaaagttcttgtttccatatttcactttcaaaatatttagaactttgacagatatgacattatgttttcattaaaacagctgatttcaaaatgttgctctgtgcagaaacgccataaacagtttatgatgaactgccacgctcttaattaaaacaataaatccagcacacaatatttgtgcagcctccggtctgacctttgcctcttgctatccaccaccaagccgcggctgcgttcccaacgccagacgtggaaggttttaaaacatgatctgaaaggcactaaagataaaataagagaaaacgtaccattagtcttcgcagttatgattaattcagttcatattttacaatctggttatggagtaaaactgcagactttacatcaagtatttgccattcactatacctaatgtataaaaatgcttgatattttagaaaatggcaccgagctaattcaccacaaccccatgaaggacaggaattgaaataataaaaacagagagtgattcgctatccatccaaagtgaagataggttcgcactggttggacggtcagcctcggacgataaatatgtcgattgcagcccggcttcaccatgccacgtttatctctgtgccgcgagatttcagattaaaatattccctaaatctctcacatctgcttccagagcaggcaacaagggtgttaattaccaagcagtaatgacagttgatttgtttccctggcctggaggcaccaagctaacttccagccttgccatcctcaaggacagaaatgattctgaactggggctcactcatttgtaccccatagagagagagcactgggctggtttggggaccattttgtagcctctctgtggagggatgcgtggacagccagcatctgggctccaggagaaaatgctcccagctgtctttggagcacagacttcctgcaggaaggggagggagtgtccaggcacctttgagggcatggagacctacctcatgatgcctgcagcaggctgacccccaagacacctccccatcacacctaacatgagcatgtgtccccatgcccgtcctccgggctttgtcttaccaccttctctgtctttccaaccctctgtccccacctgctccacatccatatgacaaacacatgcacacaatacatggactaatgcagagctggggaagcaaagcctctgaggctgggagaccaagggtgacagtgagtgggacccagctctgcaggtccttgtctgagttgcaggcagagtgcaccagggttccagaaagatggaggaaaggaaagcagtgctggccatgggaggccattcaggctcgcagccccggacctgggttccttctgcccacattagaaggagtagaaccccacgtgggccacctctctctgccagggcaagaccctcacgttggcctacctggctccagcctttgctcacctccaaagcctatcatgcctttcctctcccctctccaggacccttacttccctctaagggccctttccagcctacacagcacagtggacttagagctgtcatcgggacctgaaccctggagggaaccaatgctatgcacccctgcctgccatggagcctccgaagcggcttccagggaaggcgctgccagagcctttctcctacctggccctaaagacgtgccttagcccttgtttggttggggaattctgtcccagccatcctagctgtgaaagagccctgcaggaaggttaggccctgggggtccctgagcaccatccaggactcctgtgctcccctggccctgccccacgtgcaacatggctctctgccagggttctcactcagtgtgctcactgtgtgtgtgtgtgtgtgtgtgtgtgtgtgtgtgcgtgcgcgcgcgcgcgtgtgtgtgtatgttcggatgggatctcgttatgttgctcaggctggtcttgaactcctgggctcaagcgatcctcccatctcggcctcccagagtgattggattataggcgtgcaccatcatgcctggtcaagcctacagcgcccagtattcccagacagtctcccatccaagtactaatcaggccccaaccctgcttagcttccaagatcagataagaccgggcacattcagggtgatattagggttatgccttacactttgaatcaagcatcagagttgagatggggcccatccaccttcctgtcttcacaaaagaaggtaccctaatggcagttaaacccctctgccccccaccatctgcccctacacccaggtacttggaccagaaggaacagctccagatcctgggtacctgccatcccaccccctacattttccagctgtgcagcccaccctggcccacaaggtcacactacatgtatccctgggatcacagtggcccctgtgaatatcaccattttttagaaaactgatagatcagaggaataaagtcaccatcctgaaggcacccagtgaataagtggcaccacggaattgaaacccacacccagctgagcacggtggctcacactcgtaatcccagtactttgggagacagaggcaagtggatcacctgagctcaggagttcaagaccagcctggccaacatggtgaaaccccatctctacaaaaaatacaaaaattagccaggtgtggtggcgcacacccgtggtcccagctactcaagaggctgaggcggggggatcacttgagcctagggggttaaggctgcggtgagccatgttcgtgccattacactccagcccaggcatgcagtctcactgcagtctgagagtgagatcctgtctcaaaaaaaagaaacgcacatcctctgcctttagggctgataggccctgatagtaatgccctccaccaccctatgcaaccccaccctcggtcagacccttgagtttctcaaactgaggcccatagatacgtcctcaggagttcacgactcttttttttaagttataattttttttttttgagacagagtctctctgtcacccaagctggagtgcagtggcatgatcttggctcactgcaacctccacccctgggttcaagcaactcttctgcctcagcctccagagtagctgtgattacaggcatgcaccaccactcccagctaatttttgtatttgtagtagagttggggtttcaccatgttggccaggctggtctcgaactcccgacttcaggtgatccgcctgccttggcctcacaaagtgctaggattacaggcgtgagccaccgtgcctggccggtaagttttaattttgtgagtgttttcacttagcacattcatctaaaagaaacaatgaataagataaattctggatcacctgggtgaccagtcaccatgtcatctccatacagtttgtgttttccgtcagaacagacatacctcgttttattgcattcactttattgcacctcccagataattgtgttttttacaaattgaaggtttctggcaaccttgcatggagcaagtctatgggcaccattgttccaacatcaggtcctcacttcatgtctctgtgtcacatcttggcaattcttgcaatatttcaaactttttcattactattataccattatggtgacctgtgagcagtgattttttttttttttttttttgagatggagtctctctctgtcgcccaggctggagtacagtggcacgatctcggctcactgcaacctccgcctcccgggttcaagcgattctcctgcctcagcctccccagtagctgggactacaggcgtgtgccaccatgcccggctaatttttgtatttttagtagagacgcggtttcaccatattggccaagctggtctcagactcctgaccttgtgatccacccacctgggcctcccaaagtgctgggattacaggcgtgagccactgcacccagcctgagcagtgatttttgatgttactgttgtcattgtttggaggtgccaagaactacacccacataacatggggaatttaatcgataaatgtgcacgttctgaccgcttcaccaactgattattccttcatctctctccctctccccaggcctccctattccctgagacacaacaatattgaaaactggtcaatgaataaccctaaaatgtcctctaagtgttcaagtgaaaggaagagtcacgtgtctctcattttaaattaaaagctagaaatgattaagtttagtgaagaaagcaggtcgaaagctgagataggctgaaagcgaggcatctggtgctagttagtcaagttgtgaatgcaaacaaaagttcttgaaagaaattagaagtgctactccagtgaacacacgaatgataagaaagctaaacagactcattgctgataaggagaaagtttgagtggtctggatagaagatcaaaccaaccacaacattcccttaagccacggcctaatccagagcagcccctaactctcttcaattctatgaagcctcagcgaggtgagaaagctgcagaagaaaagttggaagctagcagagtttggttcatggggcttaaggaaagaagccaactccataacataaaagtgcaaggtgaagcagcacatgctgatggagaagctgcagcaagttatccagaagatctaagactattgagaaggtagacacactaaacaatagattgtgtttctttgtttgggttttttttttttttttgagatggagtttcattcttgttgcccaagctggagtgcaatggcgtgatcttggctcaccgcaacctccacctccccggttcaagcaattgtcctgcctcagcctcctgagtagctgggattacaggcatgtgcaaccatgcccagctaattttgtatttttagtacagacggggtttttccatgttggtcaggctggtctcgaactccccacctcaggtgatccacctccctcagcctcccaaagtgctgggattacaggtgtgagccaccacgcctggcctgtttatttctttctgagatggagtgtcgccctgtcaccgaggctggagtgcagtggcgtgatctcggctcactgcaacctctgcctcccgggttcaagcaattctcctgcctcagcctcctgagtagctgggacaacaggtgcctgccaccatgcccagctaatttttgtatttttagtagagacaggtttcaccatgttggccgggctggtctcaaactccagacctcaagtgatctgcccgctttggcctcccaaagtgctgagattgcaggcatgagccaccacacctggcctaaacaacagattttagatgttcagtgtagatgcaatagccttctattggaagaagatgtcatctagaacttccatagctagagaggagaagtcaatgcctggtttcaaagctttaaagagcaggctggctcttgttaggggctaatgcagcgggtgactttaaggtaaaaccaatgctaatttgccatttcaaaaatcctagggtccttaagaattatgcaaaatctactctgcctatgctctagaaatggaaaaacaaagctggatgacagcacatctgtttatagcattatttactgaacagtttaaatccattgttgagaaacactgctcagaaaaaaaatattttttttcaaaatattgctgctcattgataatgcacctattcacccaggaggtctgatgaagatgtataagaagatgaatgtagttttcatgcctgctaacacaacatccattctgcagctcatagatcaaggagtaacttcaactttcaaatcttattatggaaaaaaatacacttcataaggctatagctacgattaatagtgatttctctgacggatgtggacaaactcaattgaaaaccttctagaaaagattcaccattctagatgccattaagaacatttgtaattcatgggaagtactcaaaatatcaacatcaacaagagtttggaagaggtttattccaggcttcatgaatgactttgaggggttcaagacttcagtggaggaagtgactgctgatgtggaaatagcaagagaactagagttggaagtggagcctgaagatgggactgaattgctgcagtcttatgaccaaacttggatggatgaggagttgcttcttatggatgagaaaagatagtggtttttgagatggaatctactccttttaaagatgctgtgaacatggttgaaataatgacaaaggatttaaaatattccacaaagtagtggcaggttctgagagatttattctaattttgaaagaagttctactgtgggtaaaaggctattaaacagcattgcacgctatacagaaatcttttgtgaaagaaagattcaactgaggtggcaaagttcactgttgcctcagccactccaaccttcagcaatcaccactgtgatcagtcagcagccatcaacatcaaggcaggatcccccaccagcaaaaagagtatgacttgctgaaggctcaaaccatgattaacattttttaccaataaagtatttttaattaagatatgtacagtgttttttagatataattctattacacacttaataggctacaggttacagtatagcataaacataacttctatatgcactaagaaaccaaaaaattcatgtgactctctttattgtgatatttgctttattgtggcagtctgcaactgaacctgcaatacctccaaggtctgcctgtacactcttctaatcatcagggactaaagggatgggggcagaattaatgtgcaacttatgcactggggttgaaggaagacctaatggaattgtagaattctgttcatggctgtgtaagccctgagtttgtccaacctcagagtgggaagaagagagtattcaatgagaagactctccattgagtcccctctcagtttatgcaagtccatccaggtgggcaactggaatcttctctctgttctccctccttcatttctcccacagcttccttggcctctttccattcctaggtgtcccctctggatccatgccccacgctggagggacatcatcagatctttcagctcctgcattacactgagggttttagatatctcaggttcttcaaactgtaccaatgactttttcttgctcatcttgacagctcttagagaataactttcatgtgttgttatgccaatgaattatctcctttttattggttcttctggaaggaatgagggagataaagaaagaaggagccaaggaaagaagaaatccctatcttgtcaccagtggtatcaccactcttcgccattgctggagcatggctgaaactccattgctgggagccgactgaacttccttactcaaaaccagacttacatctgaaattcagcctggtgatgttgttgggaaacacttctcccagagtatctgggtggggtggagggactctcacctccaagtgaaagggattcccaccaccaagaagaaaagtgatggaagaattgagtcagctccacctccactccacccccaagatatgtaacattaccagtctggaaagaatccgggtcatacttgtcagttcccgattcatgttgtaaataacggtttcatttcagcaaaataacatcatccttcccattaaaggaatgttgctgttttaaaatggtactggtttcataacatttttgtttttaatttgtaagtgtggcttggttttgtagttttataaaagctataaatataaggagtttttatctactttggtaagatctgtagtcaggactgttactatcatttctattgagtagtgatgaggatgaaatgaaataatgcagagaaaggtgctcagctccctgccaggcacataggaagaacttattaatttttactgaatgctgatgttgttttagaatcatatatattacaacaaaaataattcaagttattattgaaggtctgcaatatttgtttgtttgcttgtttgttgttttttcagacagtgtctcactctgttgcccaggctggagtgcagtggtgcaaccatagctcactgcagccccaacctcctagacttaagcaattctgccacctcagccttccaagtagctgggaccataggcatgcaccaccatgcctggcgaattttttgcagtggaggggaggggtcttgctatgtggcccaggctagtctgaaactcctggcctcaagcaatcttcctgccttggcctcccaaagcactggggttacaggtgaaacccactaagatcagtcttttttttttttttctttctggataagctacatgagtcaagcttgaggatgaaggggctgagccactgggcctccaggaggctgggtctcactgggagggaacgagttgacctaaaggagtagccactaactcacgaatgcccactacacaatgggaggggtgccatgtaaagagaggaagtagaaagtgcaagagggtggaaagagaagagaaaagcagattagagcaaaggaagggcattaagagcacggagggagctttcttactcatccccgttgctccagcatggctgaaaccccatttctgggaaccagttgaacctccttactcaaaacttcagacttacatctgaaattctctccacccagtgatatggttggaagagcacttctcctggagcattttggtggagtgggagtttctcacctccaagcctttctacctgccaggaactgtacctctactccctattcacacacacctaatgaaattccacccattcccccagatcctcatcataaggagagagcatgtaggtctacttggagctggtatgaaaatctccccaaagccagggcattggtggattgatattaccatttcttaccctccccttcttggttatcaagacagaccgcagagtggaggcctagtaccctggggggtggcatctgcaggatggaggcccaatgccctggaggttggcatctgcagggtggaggcccagtaccctggagggtggcatctgcaaggtggaggctcaatggcctagagggtggcatttgcagtgtgggggcccaatgccctggagggtggcatctgcagagtagaggttcagtaccccaaaaggggcattggcagggtggaggttcagtgccctggagggtggcatctgcaggatggaagtccaatgccctggagggtggcatttgcagtctggaacttcagtaccctggagggtggcatctgcagggtggaggcccagtaccctggagggtggcatctgcagggtgaagactcaatgtcctggagggtggcatctgcagtgtgggggcccaatgccctggagggtggcatttgcagggtggaggctcagtgccctggagggtggcatctgcagggtgaagactcaatgccctggagggtggcatctgcagtgtggaggttcaatgccctggagggtggcatttgcagtgtggaggccaatgccctggagaggtattcaagagatcaacccacctcagcattccaaagtgctgagattacaggggtgagccatcacgcctggccttgcctggtgttcttaaaagaagagatcaggacacagacacactgagggagaccatgtgaagacacaaggagaagacagcctcctacaagccgaggagggaggccgcagaagaaactaacccccctacaccttgacctgggacgtccagcctgcagagctgccaggaagcatacttctgttgtttaagccgctccatctgtggtcattcgtttggccaccctagcagactcatacacctttggaccccaaaagtcgagaactgacgtgaacttccctgtgttccactgtgctgtcccttccaccaggcggatcctgcccagttggtctgaagaaggtgggcaaacgctgagcgtcacccccaaccccagccaccattctgccccttcggactcgccccccaacattggaggtggaagtgacatggatcagcagagggggcccgtgatctgggcctccctcagtgccgacatcagcaggagggacctggggcaacccccgctgacatggtttggatatttgtcccctgcaaacctcatgttgaaatgtgacttccaatgttggaggtgggcagagggaggtgtttgggtcatgggggcagatcccttatggtggcttagtgcctttcctatggtcatgagtgagttctctctctgttagttcacgcgagagctggttgttcaaaggcgcctcctcctctctctctctctgacgccctctcctgccacgtgacattggcctgctccaccttcaccgtccaccatgattggaagcctcatgaggtcctcaccagatgcacatggggccccatgcttcttgtaaagcctgcagaatctgaggtattcctttatagcaacacaaaacaaactaattcgtgcatgcgtctgcactgggttggtacttcgtggtgtactttccactgtcggcccaggcacagagcaatgctgggcgctggcccctcagtgactgtgaattcctgcaggtagccagcccagctccgcagcctccccagagcagcccaccatgcctcccctcaccgcccgtgcacccagggacacccacctcccagtcacctaccccactgcagtgcctggccctgtggtgcagggcgggagggccagaggcacgggtgggggcataagagctcctggggctcagcttggctttacaagggtccaaatggaccgtttcatttccctaactagccttccaggaacacttccacacggggccataaaagaaggtttagaaccaggaacttttagaagggcttttatctctgtgagtgtctattgagttttacaccccttcagggtatctgttggctgtgggcggagagggaaaaggcctctcattaaatgtacaaaggaagcagcggccagaaatgcgttggactctttgctctctggctttcaggtaattcttgggagttttaaaactcagctcccaggggagagcaggtggcagagtgaagagcagcgccctctggcagctgatggtgatttgaggcctagaggaggtccaggcagcggcctgcagcaccccaccccccgccaaggcctcctgagggccacaacaggcagagacaaggagctgacccatcggaggggggcatgcccaggcccacgtgcacctacaagcatgcaatccccacagacacctgcacacacacacacacacacacacacacacacacacagcatgcttgcagtcactcccaggagcagggtcacccacagggacctggaaacacccatcccaccttccttggaccttctcttccctggtcaccaggcctgcacccaattccaccccctgggccctcctttcactcctcacctccctcccatcctctctctcttcccatactcatagtgacaacaggccattttcagaaaaggtggccgggggcagcgccattgctcctggccgctctggccaccacctgctgagcacatctgaggacaagctgcagcagccctcctgggacccaggctggattccatagggtcaggcctgatgccagtgggcaggtaagggatggcaggcctgagagagaggctctcacctccctcccttccaacttacagccagccacaccctcaggctctggaagcgagtgcagccagctacacaatgtgcccaggtgcccccaggtccctgcatgtttccccacctgtctcagaacatcccctccactgccacccgtgtgttaatgccaaaccatgggctccaaggccccagcgtagaagcaagggttagagtaggcttagagcagcagcgcccagccaagcggtcacactagctctgtaggccacccagttggcacacgccaaagccaggcacggcagcatgctcttgggaacacgggctggagagctctgactccagctcctgcgttacctgcccactgactctaagcctttgtttcttcatccgtacaatgggagagaatcacagaagtaagtcgcttcgcaggcctgttgtaagagcaggcaacacactgcataggaagtgctgagcaccacgcctggcccacgatttggctctcaactccaactgtcaccatcttggctatcatcctggctaccgctttcctgctaacattgcatatcctacccaatgtaaacaaccgcccagtgacccgcaaagggctcaggcttgtccaagagccaggcaatctacattttcccaccaacctacggggacaggcagcaaaagcactggcctacgctcacctctgtagcccccaaccacaggactccagcaacatccgaccctgggcctggctgggccccatctgtctggaagtcttacccggttctttctctcactctgaggcctccagataaccgtggagaccaagacagccagagccgagctcgagaaatcattccgttctgactaggaaggacgctgacattcccgagtctatttccatctcggggctcagaaattttccagagacacccttcgctcggcggtgaaggcaggtgcctgccagaacagtgcccacaccccctgcccctaaaaccctgcaccccgagccctcagtgaacacaggttgtaacttcaaaatcaggaaacggaacattgctaattctcacggcagcattaactcattcacttgcacatatggggtacttggatcccagtaggtcttctatatatataacttattatacagtaggtgcaacttgggagaattaatgttgctataggaacattcggatcaaggctggcttccagagggaagagagaaaaaataagttttcctcctcagtgtacttctctgttttgagtttcagagaggaaggagcggtgtaatcaagtcagatgaggcaaggaggggcttcccttagtggtttggagaaggtgagaattcctggaagctgctcgctggggagagaagacagaaaagctcagaacatgagccaagtgccctcgtggctaagaggaccaggaaagggacttcaggggccagattcccccagccctggccagcagctccaggtgccaaagctggaacatagccttggggtgatcttcccctgagaacgggctgaaagccacctaaaaaacagcatcctgtgtactcagtcccccagccccacacccctaagtctcattcctcccaactttccatccttcccaacgataaggtgaaagcaaaggggaaattgaaagtgagtttcgtggtctacactggctcctggatggaccattgggaggacccatccctggctgaaggtcttaagcaggcagcgtattggaagcttgcatccaccatagcctgtataactgagctctttcttccggagcagcgattttgtgtccacctgtgaatgctccacctaaaccaaactatgtgttaaaaacccgggcacttggctccaaacctcacctattagaggttttcctgattggtaaatctgaacatgcatcgaatcccccaagagctatgagacgtgtaattctactatctcctttgcagacgacaggggtcctaaatcgtcctcccccactaccttccctggcacatctggggatctcagcaggctatgggtgtcgtgaaggtcacagcacagccagacacaacacctcacatacaccccaaacacacaccccaggatgactgcaccccccaggcagctgggctggctcctctcagctgccttagcagttggcactgtgctgggcaagaggagatggctcagaacgggttggctgcaggagtggatgttgagcccaagatggcagcaaagagggaaagaaaagatccacattcctaacaccattttccagctcagtgttcgccaggtgcccactcgtaccaggtgctatcttatgcctgggggatccagagataaataagatactacctctgctctcaggatgctcacaggctggcgcggtggctcatgcctggaatcccagtacctaggaaggcacaggaggtgggaggattccttgaggccaggagttcaagaccagcctgggcaatatggtgagaaccccccccaaccccatctttacaaaaaataaaattgtttaacttagtcaggcatgatggcccatgctcacagtcccagctactggggacgctggggtggaactactgcttaagcccaggaggctgaggctgcagtgagctgtgattgcaccacggcactccagcctggccaacacagccacaccctatctctgaaaaaataaaagaaaataagaagatgctcccagtccaccaaggggaggaagaaggagaggcctggaaataaataaccaagggtcatgtcttgcttcctgcctccccaggaaccaagcctaggtagggctgaataggcacctgcaaatgcccatgcaaggaccactgagatggcagaatggcagggacccgcccaaggagaagtaccaagtgtccaaaggagcctggagtggtgggaaattcattctgaacaaggaggcgtcgtcccacaggctttggcccgtcccctcccacccagctgaccagagacaacttgcaaagtccaccaagaagcaaagcctcctttgccattcagtatttcagacacattccacacaccacgacgggcaaggggccactgccgcccagagctgctgctttgcatttcatctgaagctgtgtctacttttaaaaacatatataacagtgaagtggaatctctaagcgctttccgggccactccgctcggaactgcgttgccaaacatcctaaccatttggaggggctgagtcctagagatggggaggaaacagaacagccctctcctcggggaaggtgagcagagaggacattagcattcttctccttcctgcttctcagatcggatcatctacgctgttaaaataaaggtggatttgcagcatcccagagtcaacaatttgccaaatttcatgtcacagaccagcaagggagatgagtctaatacacccacagatcctggttactctcagatgggggcaggcaggtggtgaagggttacctgtttaatcatcaaaagcccaatgggtctcccgggcattgctgagagagaccctcttctagagctcccaggcccctcagagcctcctacacatttgtcactctgctctgtgtcggaaattcttctctttgttcccttagctcactttaactcaagtgtggcgtttttaattctgtctgtggcatgattttcaaattaagcagttggtgtgctgacagctggtgttacaactggcctattccctccccccgccaccccacccacaaagagccaacgtggtgggtgcacagcctcgaaggaactcacgcacgttccaaacacccatctcctccacgggggtggtggagagttgtggggagtgcttccgaaatgggtgagagtgctgagaagctaagatgggaacagactctcacagccctggggacatcctggggtgggacaggatgcatccgaaaaatactacgctccactttccaacacacctcctgggacacaattcaggtccaaaacaccctctacactgtcaggatacctccatgcccctcatgggtcaggtcacaggccatggctaagcaccagcgcccctgcggtgcctgtgtgtcccgtgggtgttacaaatgagaattccaagcagagtccgatttgaaagtcccatttctcttattcttttctcttgttctctgtctcatcacagccctgggactgctattcacctgacaaccctggacaggtgaaggcgttcaatttcctggggagtaggcatttccagaattttgcttagacgagagtactcagaaatggtccctaaacatggaaacaaagttgtgaaggcaaccccgaaaagacctggctttatggcatatggaagtaactatgcacacttccaagccacatccatgccagttggccagccacaacctgtctccactcccacgcccccacctcccagcccatgcccatcattgagctccccttgtatgcaaagcctactaactttagagagtaacaaacagaagtggtcatgccacctacctctcagcctctggcaatccttgacatcgtctaacttaaccatagctgatggtgccttctttgttttttcttttcctggaggcatttttatcaccttcataatttaacccatttctgaaactaagcaaatgttgcatatgctagctgtaaagtggaagttttgaaaataattttttttgaagtaaggagtatcctagatctcagaatctgtaaataagtcaacaactgtccaggcacagtgtttcacccctgtaatcccagcactttggaaggccaaggttggagaaacgcttaagcccaggagttggaggctgcagtgagctacaattgttccacagcacttcagcctgggcaacatagcaagaccccatctctaaaagaatttaaaaattagtgagatatggtggcacacacctgtaatcctagctactcaggaagctgaggcaggaggatcacttgagcccaggagttcgaggctgcagagctatgatagcaccactgtactccagcctgggctacagagtgagactgtctcttaaaaaataataataagtcggtcgggcacagtggctcatgcttgcaatcccagcactttcataggccgaggcaggcacttgaggtcaggagttcaacaccagcctagccaacacagcgaaaccccatctctactaaaaatacaaaaattagccgggcatggggacaggcgcctgtaatcccagctactcaagaggcagaggcaggagaatcgcttgaacctgggaggcggaggttgcagtgagccaagattgtaccactacactccagcctgggcgacagagtgagactccatctcaaaataataataataataataataataatgtcaacaattaatctaagtatctaacatcttattcatatcaatacaaagctgagatttctgcataacaaagaatgtgtcattcctctttgcaaagttaaataaagtgttcacaagaccgttcctccaatggaacttttctttggctcctatggcttccaggaaaatgcccagagtcccaccaaagcctacagagcctgcctgattggtctgtgcctccccgcagccatgatagcccaggcctcccctcccctggcctttccactccttaagcatgcacacccctccctgctctacgggtagccttgtgcccacccctctttctctatttgaccaactctgcctcattcttttcattctacataaatgatgctccttcaggaaagcaggccttttcagactctactacagcctctaagaaaccccactcttttccttgagagcatgtttcattcctgcaaatatgtaattacttgggaaattataattttactacctgtctaacttcatatgggcaagaactatccatttttctcaccatggtatctcccaccctaaacaaatccctagtgcatagcagatcctcagaaaatgtattttttaatggagcatggatctccattattgagtcatgcacacagttaggcttttagaaggaaaggggatgaaattgataggttagacctcatcaaaattaaaaacttttgttctgcaaaaactctatgaagaagattaaaagataagctctagattaggagaaattgttgcaaaccatatatctgacatgacaaaggactagtatctagaatacataaagaaccctcaaaactcaacagtgaaaagaaaagaaactaatttaaaaatgagctaaaaaacatgaacagatacttcattgacaaggatatacagatggcaggtaatcacattgctacaggaaaggggtctggatccagaccccgagagagggatcttggacctcacgtaagaaagaattcagggtgagtctataaagtgaaagcaaatttattaagaaaataaagaaataagagaatggctactccatagacagagtggccctgagggttgctggttgcccatttttatgtttatttcttgattatatgctacacaaggggtggattattcatgcctcccttttttagactatatagggtaacttcctgaggatgccatggcatttgtaaaccaccatggtgctaatgggagtgtagcagtgaggatgaccagaggtcactctcatcacatcttggttttggtgtttttggctgtcttctttattgcaacctgttttatcagcaaggtctttatgacctgtatcttgtgccgacctcctatctcatcctgtgactttgaatgcattaaccatctgggaatgcaacccagtagttttcagtcttattttacccagctcctattcaagatggagttgctctggttcagaaacctctgacaacatgaaaagcaaagtacacttggcagtaggttttgaaaagtctattttctttatgttcagagattctacttctgcagattgctccaaaggaaatagaaatgtgaaaaatgatttcaagatccaggaagtgtatggtagactggataaagaaaatgtggcacatatacaccatggaatactatgcagtcataaaaaaggatgagatcctgtcctttgcaggaacagggatggagctggagaccattatcctgagcaaactaaggcaggaacagaaaaacaaataccccgtgttctcataagtgtgagctaaatgataagaacacatggacacatagaggaaaacagcagacactggggcctatcagaaggtggagggtatgaggagggagagatttagaaaaaataactagtgagtactaagcttaatagctgggtgacaaaataatctgtacaacaagcttccatgacacaagtttacctgtataacaagcctgcacatgttcccctgaatttaaaataaaagtttaatttaaaaaataatgtcaattgtagcattatttacttacaatatttaaccctctaaatctccaactacaaggcattagttgtgcaaattgtgtttcatccaaaagaacctaaagggcaggcgcggtggctcatgcctataatcccagcactttgggaggctgaggccggtggctcacctgaggtcaggaattcaagaccagcctggccaacatggtgaaaccccatctctactaaaaatacaaaaagtagctgggtgtggtggtgcatgcgtgtaatcccagctacccaggaggctgaggcaggggaatcacttgaacccaggaggcggaggttgcagtgagctgagatcacaccactgcactccagcctgggcgacagagtgagactccgtctccaacaaacaaacaaaaagtaccttgaatttaaactcctccaaggcgaggatttttgtgtgggcatcagtgtatcccaaatgccttcatgaaatgagcttcattaaatattatcagattggccaggcagtggttcatgcctataatcctgtcactttgggaggccaagataggcagatcccttgagcccaggagtttgagaccaggggcaatatagcaagacccgtctctactgaaaacaaaaacaaaaacaaaaacaaaaaacaaaaaaaaaaaatctaaaaaaaaaaaaacaagataattagccaggtgtggggatgtgcccctatagtcccagctacccagctacccaggaggctgaggtgggaggatcacttgagcccaggaggctgagactgcaataagccatgattgcaccactgcattccagcctgggcaacagagtgaggccccatctcaaaaaaaaaaatcaatatatcagattgattcaacctgaatgatgaaacactcagcaccacggaaaatcatgacatgagaaaatgttcacaatacagtaagtaaaaaaaaaaaaagaagaaagaaagaaacagattgtaagactctacatacatcataaccacagttttgtttaaaggaaaagaaatatacgtatctttgcatattaaaagactaaagcaaagtaaaccaaaacattagcaaagactatctctggtgaatgagaccttaggaatttttcttttctttctttaccttctttcatttcttttgtgtgtgtgtatgtgtgtgtgtgcgtgtattctatataaagtattccaaattttctacaaataacatttattcgtttttcaaacagaaaataagacagtaaagtgaggccagacacagtggttcatgcctgtaatcccagcactttgggaggctgaggcgggccgatcacttgaggtgagaagttcgagaccagcctggccaatatggtgaaacttcatctctactaaaaatacaaaaattagctggatgtggtggcaagcacctgtaatcccacctgcttgggaggctgccacaggagaatcgcttaaacctgggaggtggaggtttcagtgagccaagatcacgccactgcactccagcctgggtgacagagtgagactccacctcaaaaagaaaagaaaagaaaagaagacagtaaagcagtttggaatccatgtggagttgtgatttctgaagcaataatggaattggcagggatttgcagggaacgccctgcccattggccaacagcacacctcccagcaattcagcagtttctcagactacagtcaaaatggcaccttcgggatcttatgcataaaccggcacctattgtcctcttgtttactgagtatttttccttaaattgaggctttttatttaaagacatttctttacagggaatcttgatcacgaccatgaagggaaatccgtatcacttgtcataaataaaatgaaactgtacaatagatttcatttctttaagtggccttatttagctctagctgaatactgtcgcctgcagaaggttctgagtcggaggcctgctccctcttttgtgacaaaagaagattagcaaatgtaagagaagtgggcgttaaagacatatctgcagcaaagaagcgtttcttctgatattgtccgaaggcttgaaagtggattgaaggaggaatgacatgttgaagccgcatcgttgtctggggtaatacgcaaggttcattgtcccatggccacggaaaattgggactcagacacactagagtggggttaagagaggaagtttaataggcaaaagaaagcgaagagctctctgcacagagaggggtccgggagaaagtgggttgctgcttcagcggtgaaatgcaagaggttttatagatgagctagaggaggctgtgtctgatttacgtagggcataaacgattggtcggaccagatgtgtcatttgcataaggtatgaagaagctgaccaccccaccctaatcttttattatgtagatgtgttctctaccttgccggcaccatgttgcctgggttctttttttttttttttttttttttttgatggagtcttgctctgtgcccaggctagagtgcaatggtgacatctcagctcactgcaacctccatctcccaggttcaagcaattctcctgcatcagccttccaagtagctgggattacaggtgtacgccatcatgcccagctaatttttatgtatttttagtagagacagggtttcaccatgttgaccaggctggtctcaaccttctgacctcaagtgatccacccacctgtacctcccaaagtgctgcgattacaggcgtgagccaccgcgcccagccaactgtggttctttactgtacatgtggtgacacagaaaagggaagatggagcctccatgttgaacatacctggcttccaggtagcccttttctattggcgcagttaccagcacttacccgtgcaagctcctagcttgctcatttatgtttgcagctcgatttttcaggctgctctttgttggtttaggggctgctttttgttgaaagggaacccttgcggaggacttgtttactctcactatctgcgtaactaatttctttccagctcctgtatcagtttgattccatgtcatttattgccatgtccctgtagtacccacaagcattcctcaggctatccgtggtaggcattccacactcccgggctgactgggcctcactgctgagcctaaatgaagccctggggtgcaccagcctctgccacgctggggatccactgtccccctctgcactgtcccatacctacagccctactgtcagaggcgtgtgaacaagagcaactccatcttgaataggggctgggtaaaatgaggctgagacctaatgggctgcattcccagatggttaaggcattttaagtcacaggatgagataggaggtcggcacaaaatacaggtcataaagactttgctgataaaacaggttgcagtaaagaagccagccaaaagccaccaaaaccaagatggccatgagagtgacctctggtcgtcctcactgctacactcccaccagcgccatgacagtttacaaatgccatggcaacgtcaggaagttaccctctatggtctaaaaaggggaggcatgaataatccaccccttgtttagcatatcattaagaaataaccataaaaatgggcaatcagcatccctcagggctgctctgcctatggagtgtcattcttttattcctttactttcttaataaacttgctttcactttatagacttaccctgaattctttcttgtgcgaaatccaagaaccctttcttgggttctggatcaggaccgttttcctgtaacattaccaccctcgggctccaggtgtgggacagtgcagagggggacagtgagaagcccagagactgaagggggcgctgactccgcaggtcactcttagaccttaaagagtatcttctcccaccctagggaaggaacataggtgagggaagcagcgagctctgctctctctagcctggtaaaggtgtgagatgtgagcttctggaatgctgggcaggaggaactggggtgaatgatttgcagtcatgtttgccagttgcagaaccaggaaaaatgatcctttctttcctcgagtgctatcaagtgaactgcaccagctccattagcgctggaagcatccatatgaaattatggggcttatgatggctttgtctgggaaactgttcatttctgatcggaagttctattacacatgaatttaattctaaacagtgttaccaacagccccaaatgatttacattttaagcaatcttctttcattatctcataccttgacggggagcaaaagatggatttttatgggcttctatgatgagaaatgattaatgcccctaaatgggtgcctgtctctattccagccattctgacaaggggtccctttcctcaattctgcttcagtgggcatatttgaaagctgagatcaaagaaacggcatggagaaagaacattacaaacttttcttaagttggatctaaataaggtaaacatttccagtgagggcattgaacaccatttggtacctaacattgtctttcatccagaaagagagaggaaagagggagaaggagaaagtttgtccacttataaagccaaaggctgtagtgaaagcttgaaaatgtatgagaaagcccagacgcagcggctcacacctgtaatcccagcactttggaaggcctaggcaggtggattacctgaggtcaggagatcgagaccagcctggccaacatggtggaaccccgtctgtactaaaaatacaaaaaattagccagttgtggtggcaggtgcctgtaatcccagctagtcaggaggctgaggcaggacagtcgcttgaactcgggagacggaggttgcagtgagtcgagatcacaccactgcactccagcctgggcgacggagcaagactccatctcaaaaaaaaaaaaaaaaagaaaagaaaatgtatgagaagcaatttgagtttaatctttcagggtcagggagagagagggcactaccctccagacagatgcaaatctggaatgttgcctcccatagtgatgctgtaacgaggcacctcaaaggtaggaccagatgaggcatgccagctctcccgcctgctttacctctgcctttgggatcattctttccagggggcacctggacaaccagctcagaaacaccatgagggtaaggttgttggatgaactgctacaaggacacttttctggaaacctctgttcacgcaccagaatcagatgggacattcctcaagagacagattctcttctccagttccctgcagtgaattccttcccctcctcccgtcaaaggaaggggcgtctgtttgaggatcgtggcctgagtgagcccttgccattgaatggttggctgagaggctgagtcactgggaggaaaacgtggagtgagttgtgtctgagacctccccagagagaggggccactttagactccaaccaaatcatagcccaagttcccagcccaaaaggtaacaaagtaaacaagatgcaagaaattcaggtgctctgattttcaaattgtagaaaatatgcaaaaacagcctcagaaaaaaatcatctttgcagcatcagaaaccctgccttcctctaggattctgtggcttgggcggcctcagaggcactacccaaaaataaccaaccacaagtcaaggaaccagaaagcaaattgagctgcagaacgtgaacggcctccactcagagaagggggggtcatgtccttgaagcagggcccacggttaccctgagccccctagaacagtcctccctccccctacagttcatggtatctttagaatcaaggctacaaactgcatgaatagcgagtaattcaattaactctatagtctgtgatgaaaaaaagggccattttgctagctctagtggagcactagtttaaccctggtgctcaggaaattcccaggccagacagcatattaaaccagctcttcaacttaagaacaattactgtcatttatcagcctgaatagcaataatgcacaaatcgacacctttcaggaggcaaaaagctagcgaggtgtaatgatatgcaaagccacagcactctacattttgaactgtctccatcccatcaatacatctcctactacctacaatttatcaatacaaatgtggtacccaatgaaggcaagaccaagaagataaatatgaagagggtggggggaaaaaaggctcaggaatgtttgaattttaaaatgatgaagtacagatcacattcttaaaacattttacatgcaatgacccgatcacatcaagttctctcctgaaagaagaaacagaataaggggatttttctaccccaaggttgcaggcagatgcagctcttctcttccatttcccagatcatgtctttacgtggaagtgtgtgattctttaggtctctgataaaagtaaataaagatattgctaatcatagtgatgaattttcatagagcctttttcctaattactttcacatctatctttttttattttaatttaatttaattttttttttttttgaaacagagtctcactctgtcacccaggctggagtgcagtggtgcaatctcggctcactgcaacctctgcctcccgggttcaagcgattctcctgcctcagcctcccgagtagctgggactacaggcacgcaccaccacacatggctaatttttgtattttttagtagagacagggtttcgccatgttggccaggctggtctcgaactcctggctacaagtgattcgcctgcttcagcttcccaaagtgctaagattacaggcatgttattttaattttataatatcttcaagaggtaagataaatattatgatacccattttgaaagaaggggaaactgagacatgctgtgattaagacactctctacatcagtcagacactggcagagcaagggctagaaactgggtccggactcccagcctgtccctcaaaagtcacagcacatccagggcaaaacaaaggcttcccagaagtgctcatgaggatgtgcaggaacttcagtacatgtagcaccagtgggagtaggagccgcgaggcggggcagagcagagacaaacaattttacatttcaggccaggcctggtggctcacgcctgtcatcccaagcctttgggaggccaaggagggcagatcacttgaggtcaggagttcaagaccagcctggccaacatggcaaaaccccatctgtagtaaaaatacaaaaattagccgggagtggtggtacagcacctgtagtcccagctactcaggaggctaaggcaggagagtcgcttgaacctgggaggcggaggttgcagtgagctgagatcatgccacgaacctgggaggtggaggttgcagtgagctgagatcatgccactgaactccagcctgggccacagagcgagactccatctcaaaaaataaaacaaaacaaaacaaaatttcacatttcaaaaacagatgaatagaatttcaagtctgcagctcacacagactgagcccctactgtgcaccaggcgctgaaggaggcaaagacaatgccagcccagacccaggctctgcttgtggtcctcccctcccacatacccagccctccccaacacacactgacattttgcttagcagcatcatttagctggatagaatacatttactttctgtggagggaagccaagaagggtggtacctaagacaggaaacattcctacaaaggcaacagggacagggggtcccatgggagctcttaatgcaagtcaggcaaacaaggacctccttgttgaaactctgcacccactaaacactggtgcctcaaggagccccgagggttgtttaccaccgcagtcatttttatccttcaccttccacccatttcacaaacccatccaggccctcccagccgttttatcacagacgctcatcatctcagtccaggaattttgtttttgtttttgttttgttttgtttgagacagagtctcactctgtcgcacaggctggagtgcagtggcgcgatcttggctcactgcagcctccgcctcctgggttcaagcgattatcctgcctcaggattctcttgcctcagcctcccgagcagctgggattacaggcatgcgccaccacacctggctaattttgtatttttagtagagaccgggtttcaccatgttggccaggctggtcttgcactcctgacctcaggtgatccacctgcctcggcctcccaaagttctgggactacaggcatgagccactgtgccctgccctcagcccgggaattttgaaatggcgtccaactctagcatgcaaactcatgccctctctctaagcaatattttcaacctatttgaaaaggaaaatagtgattggtggtaaaatgtaaaggatttgtttgcttctatgtttctttggaagattagctgtttttttttaaatccacttatctttatttcttaaggtaatacctacctaatttttctttttctcttttttttttagagacaggctttagtgcagtggcatgatcttagctcactgtagcctcaaactccagggctcaagcgaacctctcgcctcagccttctcagtagctgggactacatgtgcatgccaccatgcctggctaattttttttacagacataaggcctcactatgttgcccaggcttgtctgaaactcctaggctcaagcgatcctcccaccttggcctcccaaattgttgggaatacaggcatgagccagtgcacctggcccctacctaattttaaatcatatacaacacacacacacacacacacacacacacaaatgaaacaaacatatcttctaaaagcactgagataatcatttgacgaatgacatctcatgtcttaatttttcaatgggtaaaggaaagccctaaacaaaattcttattttctgacatcaaataagaatgtgggtgcatttccctccctttataagaaattacaccttgctcttactattaaattagaataccctctcttcttttctaaaatttggctgctgtacaataaatacataaatcaaagagacataggatccagacgccaattggcagacggcactatgaaataagcaccaggacacaggcatgcggaagtgttacaacctgttccaatctgctccctgttcccccttaaaacaaaagaggaagagagtccaaaccctcctacacacacacatacacacacacacacacacgcacacacacatgcacagagcaaagtttaggaggtttaaatagagcctaagctgctaagaagaagagccacccaactgcttaggacctgggtttctcactcttgccgctgagctgcaatatttgccgcatcttgccaagtgaagatggtgtgaacctgtcatgcaactgctgagaagtttgggaaagcctggggttttgccagtattgttatcatcctcgtcctcattgccatcaggccagagaaattttccaagcccttgagcttggggtctttctcaacagccatgggatggtggccattagaattacctccaatattcatgtgacgaaatccattcagagatacaggggaggcagagaataggtgggtgtagcaattaggacacttttggttgcaagcaacagaaagtccaacctgaaaagggttgaggcaaaagataagatatgggctcatgtacgtgaaagatccaaagagtaaagtggcttggggcaggaatcagttagaaacctaccattcccaacctctcctactctgcttcctggggtaaccttcttccccaacataacacttggaccagcggaaaatgagttcaaaccaaagctcagaactgacactgattggcccagactgcattgacttgggtcatgtgtccatgcccgagccaatcactgcagccagagggatggaatgcatcgactggcttaaactaggtcatacgcgcctctctgcagcatgagggtaagatcttcaccaaagcatgtgggcagggagaagtgatgtgtgagccccaggcggcaaaaccaggaggactggtgttgggaggtcaaatgcaacaaacgcccacttcaagacgccatctttggtcagaccaaaaatctccaattccattgaccaagatatcgtacccagagttcactcgcaatttgagtagagaatatagccgcttacttgtgttgaatgtcctataccttctacatctaggctgaatatggcccctgcatcaccaaaatctgatggattcacataaaggactcctgaagataagttttgcactcaccagtgtccggtattttaatatctgccattcttgagttataaagctcaggccagaagattaaacagtcgctggtcaagaactaaagaaatgaggtgaactgcaggaccagtcacttgcactttatacatttttttaagtttaattaagattacaggtcagattaagtaatggctttctataagagatagataaacacagagacagttgcaccaagattgtttaaagaaaccacttaatttcaacttcaagatgttctttttttcatccattaaactgtatttgttgaaatataacatacctatgggcaagtgcacaagttgtaagtgtacacctcaattcttatcccaacataaacacattcaagtaactgctattgaggtcaagaaatggaacattactggtgccccagaaactcctttggaaccccctcctaatcagtatcctcccctttccacccaaagataactactgtcctgacttctaacaacgtagatgaattttgcctatttctggaactttatataaatggagttacacagcgtgtactcttatgcctggattccttctttcaaaagaaagtcacccaagttgttacatacagtacagctcattcatttttctgtttaataaatcattacgtggatattctgaaatctgcatatgcaatctatttgggattatcatttaggctattgttgtgaatgttcttatgcatatgcagacatttctgtttctgtttctatgcaggaggggaactgatgcagtttcacctttggtaaataaaggcaaatagtcttctgacgtgtatacaccaatttatgcccctagcagcagtaagaccttcctgaacaccattgcccactagttactactgccttgatcagttcagctctgttcctaactatgaccccactaaaagacgctatgtgtagagctcgggaagcagccagagctcaatttaaatcctggctttgccacttactagctgtgagtgtttctttggagaatttcacttagcctcagattcctgatctgtaaagggcctgtaagcatcatgttcttgcaagaatcaaattgtattttataaaccaaagtgctttgcaaactgttaaactgaatacccatgttaggtattagaagtgggtccctgaggccaatattacagtcaccaagtgttaagatagaattctccccacagcattagaaaggtagaccatagcaagttagaaagacctgggttactatatgacctttgaggagtcactcagtctctttgatcctcagtttttttatctgtgaaattagggcagcaaggcttacctgagaggattgtgaagataaaaagagagagggagagaaaggttgagagaaaaagagagagaaagagaatctaactgttgattaggtatctacaagtgctcaaataaccatggtcattattagtaaaagtctagaaaatatgggagaaaacctggttccctgaatccttttcactgatacgctcatctttcatgataaaggtgggttacatgaaaaattatcaattgataaaatttggcttttccgtttttgttttgttttctgcctgtttcacccatttaaagactcaccatacccaggctttcttaagatccacctccttaagaaaaacttgctatcaagcctggcgtggtggcgcatgcctgtagtctcagcaccttgggaagccaaggcgtgcagctcacttgagctcaggaattcgagacagcctgggcaacatggtgaaaccctcactctacgaatattaaaaaaaaaaaaatagctaggcacagtggtgcatgtctgtagtcccagctactcaggaggcagaggtgggaggatcatttcagctcaggaaatcaaggctacagttagccatgatctgccctcaagcctgggcaacagagtaagatcctgtctcaaaaaaaagagagagaaaaaaagcttgttatcgggaaaatgtgaaatgtcagcattcaataagtcaatcccagaatatcagagctagaagatacctgaaggcatacaacccattcagttcattgtacagatagtgaagctggggccagaaatctaaagtaacaccactggttagtggcagagccagagctaggtcctgacaaccagcccagggctcattctttagtagcttaataccaacgttaatctgtatctccagtgtaaataaaagaattggttctttcttaaagacctttcaagcattagagaaagagttcaatcacatgtaattgacccctaaattaaacaggccctgctaaaatttaacgcacagacatagacaaaaaccatcagtgtttatattttaaataatatctttcttttaaaaaattggagaactgcttctacccatgacagaataactgatatgagacttgccttcctgccaaaaataactataaaactagacaaacatatgaggcaactgttttcagacactgaacaacagacagtgcatcactgtaattttgagaaaaggcatacacatgaggtgagccccactgttcatctagctttctggctggaggcacctttctgtcaaggcacaaagatgggaagtccaaatggagcaatagttgcactgagctgaggaggtggagattggagtcctactttgttgaaatggctggattttatgaagcagaataacagagaatagtgatcttcacaaagaacatggggccttggctgcgggcacagaagtgcatgcagagtgagattccaggaagcctagcagaagactcctactatggagctgtgaatggtatggtgataccagaggtcatgcactgctaaaaagcactgaaattttggctaagccaaggtagagaaagttcactgaatgccccaagcctccagctgagaccttgaaaaggccatgcctttgggttaaggaccaaggccctaagtgaaggcaataccgtaagactcagctcaaaattaaaatatatctgaacaacaaattaagccaaccctaacagagcagaaagaatctaccaataatgttactgacagaacaaacattaaaactctttaaagaaaaatatgacataatttggaatctccacagtgcattattcacaatgtccactatgcagtcagaaattactagacatgaaaaggagcaacaaaatatgatccataattttttttttttttgagacagagtcttgctctgtcgcccaggctggagtgcagtggtgctatttccactcactgtaaactccgcctcccaggttcatgccattctcctgcctcagcctcctgagtagctgggactacaggcgcctgccaccacgcccaggtaatttttttgtatttttttagtacagatgaggtttcaccatgttagccaggatggtcttgatctgctgaccttgtgatccactcgcctgggcctcccaaagtgctgggattacaggtgtaagccacagcacccagcctataatccataattttttaaaagcattcaatagaaaatgaccccaagaataccctcatgttgaaactagtaggaaaagtctttcaaacagctacataaatatgtgttcaaggacttaaaagataaccataatgagtgaagaacagagatataaaaaaaaaaattttaaagaaccaaatggcaattctgaagctgaacagcacaatgcctaaaatgaaagctctgcataaacttaatataaaattagagactacaaatgaaagttaatgaacttaaagacaaatcaaaccagagaacacagagaaaaatatgggcgggtggggaataaacggaggctcagagacttgtggggaaaatacaagcagtcaaatagatatgtaattggagtcccaggaggaaaggaaagaaagaagataggaaaatatgtgaaggactaacaactacatttatataaattttgtggtaagtatgagtttatagagccaagaggtcaataaatcccaaaagacacaaacaccaagagggctacatctagatcacgtcaatgtcaaactgctgaaaatcaaagttaaaggaatgtctgggcatgtgattacacctgtaatcccagcactttgggaagctgaggcaggtggatcacttgagcccagaagtttgagaccaacctgagcaacatgtgaaatctcatctctacaaatatatgtataaattagctaggtgtggtgacacgtgcctgtagtcccagctactttggaggctgaggtgggaggatcgcttgagcctaggagtttgaggctgcagtgagccatgaatgtgacactgcactccagcctgggcattggagtgagaccctatctcaaaaaataaaaataaaaaacaatcttaaaagcagccaattaataaaggctcatagcttacagaagaacagtgatattaatgacagctgacttatcagattggaatttagatctataagaaggaatgaacaaccgtagagtggtaaatatgtgggtaaatataaaagaatacttttcctctgttaattttttagtaaaacaactgtctaatcaaaattagtaacacagtgtcatgggatttattaattattactaaaaatatgacatttttagtcataaatgtacaaaggatgattcagtaaatgaaccaaagcacaaaggatggttcagtaaatgaatttttctattgtaagggtcttatgctttacgtgaggtggtacaatattaactcaaaatagaccacgatgagttaagaatacacatcataattcctagagcaaccacctaaaaaaaaaagttacaaagaggtagagctctttgtaataaaatatataaaaagatggattacaatgaaaccaaagtacaataatgcaaaagtattcagaaaaggaagaacagataaatgcaaatcagatggaataactagaaaataaattgtgatatggtagacttgtagacagtcaatcactaaattaaatacaatggactaaactctccagtcaaaaagcacagattgccagataggattcagaaagctatatccaactatatgctgtctacaagagacattttaaatgaaaataaataggttaaatgtaaaaggatggaaaaaaagacaataagcaaacaaaaaagctagtttgactatattaatgtcagacagacttcagaacacagaatataaacacagataaagaaggacttttatagcaataatgatttcatagtgaaaaagataatttatcaggaaaacataacaactcaaaatatgttacaaacaaatgtaacaataatatatatagttatatattattatatatagatatataacaatatatattgttatatatgttgatatatatatcaacataaatatcaacatgatatatatatcaacatacatatcaacatgatatatatatcaacatgtataacaataaataacaaaccttcaaaatacatgaagcaagaccaaacaaaactaaggggaaaatagactaatccacaattattactggagattttaacacttgtctcttggtaatcgctagaacaattagagaataataataaatatatagaatatttgaagaacattatcaatgaatgtgacctaattgacgtttttagaacactgtacccaacaattgcaaagtgcatgttgtttttaagtgcacctcgaaggtttaccaagaaaaatcatattttgggtcaaattgaaatctcaataaatttcaaaacattgaaattttaaagatttaaacaattaaatctttaaacaattaaatttaaagatttaaacaattaaaatttcaccacaatcaaaaagctgcaaatatgtataaattcacaacatgcttcgaaataatgcatggattaaagaagttacaaaaaaaaaccttgcaaaatatttaaactaaatgataatgtgttcttacacagcatatgaaagtttgtgggatgctgctacagcagtaattagagaaaatgtatagcctttaatgagttatgttagaaaagaagaaagttttaaaatcaacaattaacgtttccatcttaagctggaaaaagcaaattaagtttaacccaatgtaagtacaaggaagacagtaataaagatgtctaataatgtctggtaataatgaagtcaaaagatagacaaatatttgagaaaattagcaaaaccacaagtgtctttgaaaaaaattaacaaagttgatgaatcccaagaaaaactaagaaaaaagacacagtaaatacaaattttcaatatcagagatgaaaaggaggacatcactacagattccacgcacactgaaaagataacaaggcaagattatgaacaacttaattctcgtatatttgacagtgtatatgaaatgaacagatttattgaggattttgattcatcaaaagggatattagaagaaatagaaaatctgtaaaagtcttaattccattaaagaagttgaatttgtaatcaaaagcaaacttgaggactaatggtttcactggtgaattctattggatattgaagaaaagaacaatcccagtcttacataaactctctcagaaaatagaggatgagagaacattccttcacaagttttgtaaggataggagaatactgattccaaaccttacaaagaaattacaagaaaggaaaattaccagccaatattctttataaacacagccacaaaaattgtcacaaaatattagaaataaaattctgtaatataaaaagagaataatacatcatgaccaattagagcttttcacagaatttcaggttttttcaacagtcatatataaatcagtgtaatgcacaatattaacagaaaaagggaaagaaaaaataatctgactaaatacaaaaaaaagaactatcaagaatcaatatccctttgtagaagaaataaattttaactagaaaaacaaaggaacttcatcaatctgataaaggacttctgataaatctacaaccaacattatgcttaagggtaaaatactaaatatgttcccctaaacattggaaacaagacaaagaaattctctcctaccatgtctattcaacattgtcctggagatactagccagtgcattaagaaagaaaaaagccaagatcaaaaaagaagtaaaactgtattcatttacagatagtatagtggtttatacagaagaccctaaggaatctacagaaaaattgctagaacatcagtaaacttagcaaggttgcaaggtaactcagtatacaaaaataaatagtatttctatatactggcatcagcaaacaattggaaatgaagtttaaataatttcagttatattttacatttttgcattaaaaatataaaatgcttaaaaatacatgaacaaagtaagtacaagatctttgaaaacattaacaagagaaattaaagaagtaaaggtcaatggaaaggtgtaccatgtttatgaattggaagactcaatattggttgacttctagtactggaggactcagtacaaaaggctcaacaacaatatataacttcaatgcaatcccaatcaaaatccacagactaaattcattactgaaatgaaaagaatctgtaatagccaacgttgaaataattgaaaaataagaacaatgttggaagactaatactatctaattactaaactagagtaatgaagacaataaggtattagcattagaatagatgaataaatcaatggaacagaatagacccataggtactgattttcatcaatgacaccaaggtcattcaatgagcaaaataaagcatttcaacaaatagtgctgaaagaactgaataaatatatggggtaaagtgaacctcaacccctacttcacactatacacaaaaaaatcaaattgaaacagactataagcataaatataaaagctaatactgccaggtgctgtggctcacacctgtaattccagcactttgggaggctggggcagaagaatcacttgagcccaaaagttcaagaccagccacagcaagaccctgtttctacaaaaaaaaattaaaatattagctgagcatagtggcgtatacctgtagtctcagcacactgggaggctgagatgggtggatcacttgagcccaagagttcaaggctgcaatgagctatgattgcaccactgcactccagcctgggcaacagtgtaagagaccctgtctcaaaaaagtatagttttataaatactataatatttacaatattatagtaatactgtaataatataatcggagaataattccatgacctctggtagacaaacatctcttagagaaaatacaaaaggcactcactttacaagaaaaaatgattaacaaattgaacctcgtgaaagttaagaatttctactcatcaaaaattgctgttaagaaaatgggaagacaagccacagactggggaaaaatattcacaatttgtgtatctgacaaagcacttgtatccaaaatacataaagaacttaaataaatcaaaaataaaagatttgagcagacttttccagaaaagatgtttaaatggccaaaaagcacatgaaaggtgctcaacatcattaatcctctaagaaatacaaattaaaattacaatgagatagtacttcacaaccactaggatggctaaaattaaaaagactgagaataccaaatgttggccagaatgtgaaacaactggaactctcatacattgctaatggggattaaaatggaacaaccaattaggaaaactagcagtttcctggaaatttaaacatacacttactctatgacccagcaattccactttcagatattctcccaagagaagtgaaaatgtatgttcacacaaaacttgtccacaaatgttcatagcagcttttgtcgtaacagccatacagctggatacaaccccaaatgttcatcaacagaagaatggataaacaaactgtggtgtattcatgcaatggaatactactcagttgatatgtacaataacatggatgaacctcagaaaccgtatgctgaatgaaacctgccaggcacaaaagggtacacgttatgtgattttatttatttgaagttcaagacagatcaaagcaatctatcatgatagaaatcagatccactatgggtggtgggaatttgctggaatggggcacaagggaactttctggggtgagggaaatttccatatctttttttatgtattcaagggatacatatgcaggtctattaccagggtgtattgtgtaatgttgggcttctattgaacccatcacaaaaattaactcaagttggattaaaaacttaaatgtaagacctcaaactataaaaatcctagaagaaaatctagaaaaaaactcttctggacattggcctaagtaaagaatttatgactaagccctcaaaagcaaatgcaacagaaccaaaaattgacagttggtcctccattaaactaaagagcgtctgcacagcaaaagaaataatcaacagaggccgggtgcagtggctcacgcctgtaatcccagcactttggcaggctgaggcgggtggatcacgaggtcaggagatcgagaccatcctggctaacacggtgaaaccccgtctctactacaaaatacaaaaaattagccgggagtagtggcgggcgcctgtagtcccagctacttgggaggctgaggcaggagaatggcatgaacctgggaggcggagcttgcagtgaaccgagatcgtgccactgcactccagcctgggggacagagcaagactccatctcaaaaaaaaaaaaagaaataatcaacagagtaaacagacaacctacagaatgggagaaaatatttgcaatctatgcatccaacaagggtcgaatatctagaatctataaggaacttaaacaactcagcaagaaaaaacaaatagccccatatcttgattgtggccttggttccagctgtatggttttgtcaccacttgtggaattgtacaattaaagtatgtgtatttcactgtacacagactttaacttcaatttaaaaaatgtaaatacacattccacttgtactgaatcttgctaatgcaagactccagcgccttactaagtctcaacggtgttttctgaagttcccggagtagactatgtgtgctcatgaacaagtccttcaggcttccgtgcagcccctgctgtcattgtggcttctgcaggctcctggggcttcccaagcatccctgactttcctggcctggctgctgcctcccttccactgcagtctcccctgtctgttagatctggctcctcacaccaaaaaagctgtggttatttatctgtgatgacaagcccctagcaggtcactcataactctcagtagaagactcccaagcagtgttactgtgagagttctgccaccatagtcatcatgtttctctgttgttggccccaatgtttgatcgattttgctgttattaatattgtttttctggaaaactgctctttcagctttttcttttttttttttattattatactttaagttttagggtacatgtgcacaatgtgcaggttagttacatatgtatacatgtgccacgctggtgcgctgcacccactaactcatcatctagcattaggtgtatctcccaatgctatccctcccccctcccccctccccacaacaggccccagagtgtgatgttccccttcctgtgtccatgtgttctcattgttcaattcccacctatgagtgagaatatgcggtgtttggttttttgttcttgcaatagtttattgagaatgatgatttccaatttcatccatgtccctacaaaggacatgaactcatcattttttatggctgcatagtattccatggtgtatatgtgccacattttcttaatccagtctatcattgttggacatttgggttggttctaagtctttgctattgtgaataatgccgcaataaacatacgtgtgcatgtgtctttatagcagcatgatttatagtcctttgggtatatacccagtaatgggatggctgggtcaaatggtatttctagttctagatccctgaggaatcgccacactgacttccacaatggttgaactagtttacagtcccaccaacagtgtaaaagtgttcctatttctccacatcctctccagcatctttcagctttttcttagacccatctttcttcccaagacgtgtggcggctggaccaggaccagtgatgagcaggagacaatctactgtccttaagaccacatctcactccagggctcacagcctttcaaggtcttcctttgcaatgacatccctgccccaccccacctcttgagaagacagaccatcctggaccctctccttctcccatatttcgatgtggatacccaaggagagctgatgtgctctttttcttaattttttttttatttcagtagctttaagggtgcaagtggttttttgttacatgggtgaatttgatagtgatggagtcggggatagtggtgaagtctgcacccatcatctgaattgcacattttgtacccaataggtagtttttcacccccaaaccccctcccaccctctccccttttgagtctccagtgttcaccatatcactctgtctgcccttgtgtacccatagcttagctcccactgacaaatgagaacatgcagtatttggtaactcctgagttacttcccttaggataatggccccccagttccattcaaattgctacagaaggctttatttcattcttttttaaggctgagtagcataacacggtgtatatataccacattttctttatcctgtgattggttgacggatgcttcagttgattccgtatctttgcaattgtgaatagtgccgcaataaacatacacgtgcaggggtctttttgatataatgacttattttcctttgggtagatacccagtggtgggattgctggattgaatggtagatctgctcttagttctttgagaaatcaccataagctctctcacagaggtgacactaatttacgttcccaccaggagcgtataagtgttcacttttcaccacatctgcctgttgctgttgcccgtcccactagacctctatgagctcctcttatctcacctgagaaaatcttatactccttcctattattccccagtttttagtaaagttcgttaaacacaagtttatgctagcagggctttggggaaatgagaggaagcctgtccactttgccccatgtgtaaactccagacctctccccatttctcaaagccttccaagcatgaactgagtgtttcacaaactttacgaaagactggggataataggagggaacatacagcagaagaggaaaaatttaacattggacaccagatctcttgattccatcagccaaaatcttttctccagggatccctgattccctggaagatgacacactgcaggggtcctctgtaatcctctttctcccctctacccaagttttgtcagggggattcaaaagcaaacaaaacaaacaaaccaaagatctctgttaatattgcgtgatctcagtgagaggaggccctgtctgaagtctgtgcatctcagttacccaccgtgctttgacccccagtgcttcagggcccctcactgctctctacctcaaagttgcagacacaagctgctgggagttctcaatggacacatagagtctcttcccacttctccaacccctcagcttcaggcatcactgggttgaataaaccttggtcctctcgactccttcccactacctctctgccccgggctgcactaggctcccaagtcagacagccggggctgcagcccctatcccttgcaatgagtcttctccagggagggccctcattttggggtatcaagagtgtccacagcgtggatgcagtgaacaggtaacacttatacactgctggtgggaatgtaaactagtacaaccactattgaaaacagtgtggagattccttaaagaactaaaaatagaactaccatttgatccagcaatcccactactgggtatctacccagaggaaaagaagtctttatatgaaaaagatacttgcacatgcatatttatggtggcacaattcacagttgcaaaaatgtggaaccagcccaaatgcccatcaatcaacaagtggacaaagaaactgtgagatatagatatatatagatatagatatagatatatataatggaatactacacagccataaaaatgaatgaattatggcatttgcagcaacctggatgagattggagactattattctaagtgaagtcactcaggaatggaaaaccaaacatcgtatgttctcactcataagtgggagggagctaagctatgaggacaggacacaaaggtataagaatgacacagtggactttggggactcagggggaaagggtgggaagggcgtgatggataaaagactacaaattgagtgcagtgtatactgctcaagcgatgggtgcatcaaaatctcacacatctccactaaagaacttactcatgtaaccaaacaccacctgttccccaataaacaatagaaaattttttttttaaattttaaagagtgcccacaggacacacacatcttatgcttagccttgaacatccaatgcccctatttcaataactaccctgttgatgtttgcattgctatggctgtgtccattttacctcacaatcaattttagatgattgcagaaccaaagcaaatgatttgcagtagggtttggggtttaaaggtttggtttaaaggtttggtttggtttggatagagctatgctctatcgttgggttttcaatgagtagctaggtgacctcaggcaagctacagcagattaccttgaagttacttcagcaagttaccccactatgcctcatttttcccatctgtaaaataaggataataacaggatcatggggtggggtgaggattaaatgagttaatatgtgggaagggtatataatcgaacagtgtctgcaacagagtaagtgctatttaaacgtttgttacataaattatgaacattatataaattgtcttcatggacttcaaaagcaggacatgacatacggtgggaaattagttgaagaaaccaaaacttgtatacgttcttttagatacgccacttgtgtgaatatttttaattcagctaaggggtaaattatatagatgtgcccacaaggttgcttttagcttagtcaacaagagcagaagcttcaagatggcaaataaaacaacatccaagacaacgttgaaagaaaggtgaatgatataattggggtcaagccgtcttcaattgagggcactctcttggctccacttcccctcactgtaagaaatacagctggagggataaatacaaggacacaggccccaaagatgtctgagtggccagagaagagagacccccaaggctggcttgcaggctgcggggctgggggcggaggcgggggaaggaccttcctcggtgtcctcttatgaggcagaggggaccagactatccatcacagcatcataatgcttaagtggcatgaagtcgtaaagcccacaacgaagcagggatgctccactgccagcggaatctctctctctctctctctctctctctctctctctctctctctctctctctctcttttcccttcccccagtccctccccaacccaacagtggaggcaggaggccctgagcagccagccctccagctcagtcactggtcagagggatctcctgaggatgggctctctgccctgcccaacaaggctacaaagtccgggagaaagcaacgtcattcgttcattcatccactcattcattaattatgtactgagtgcctatcacgtgtcagaccctgccccaggcattggaaacatcagagactcaaaccaaaatgcagtacaggccagctgtggtggctcacgcctgtaatctcaacactttgagagactaaggtgggaggatcgcttgagctcagaagttcgagaccagccttggcaacatagtgagacctcatctctacaaaatatcaaaaaattagccaggtgtggtggtgcatacctgtggtcccagcaactcaggagtccgaggcaggaggatcgcttaagcccaggaggtcgaggctatggtaagctgtgttcacaccactgccctccagcctgggcaacagagtgaaaccctgtctcaaaaaaaaaaaaaaaaaactgtagtacaaccgcatagtgaaatattatccagcctgaacagaaaggaaattctgaaacatgctacgatgtggataaacttcaaggacattatactaagtgaagtaagccaggcacaagaagacaaatattctgtgattccacttatatgaggtccctacagtagtcagttctatagacagaaattggaatggtggttaccaggagctgaaggcggggtgaacaaaaagttactgtttaatgcaatggtccccaccccaacttttgtggcaccagggaccagtttcatgaaagacaatttttccactgatggggcagagtgtgtgaggggggagatgtttcaggacgaaattcttccacctcaaatcatcagacattagttaaattctcataaggagcacacaacctagatccctcgcatgcacagttcacaacagggttcacgctcctataagaatctaatgccactgctgatttgacaggaggcagagctcaggcgataatgctcgctcgcctgcctctcatctcctgctatgcggcccatttcctaacaggccacggactgataccgatctgccacccaggggttggggaccccggtttaatggtacagagtttcagttttgcaagatgaaaatagttttggagatgatggtggtaatagttgcacattgcataacaatgtgaatatacctaagaccactgcactatacacttaaatattgtcaggatgataaatttagcgttatgtgtatttgacaaccttttaaagcaaaacaacaataattatgatgaaagaaggtggagcttgagtaagcacttgaaggaggtggtgcgattagccaagcagtcccctggggtaacagcagaccaggcagacggaagcaaaagggaagaaggcactgaagtgggaccatgtgcttgatgtggtgaagccactgcatccccccagacttcatgccacgctggtgacattttatgcagagcacagagagttaggagagagaacagcactttgtgctccacaaaggaagaaggtccttgagctataagccccagaggctcagtggactatgttgatttcatcagctttggtgataaataagctttgtcattccccagtctgctaataattgggtctcagacaaatcagtgatcaaactttaaaagacagtctgtgaaccactaaatcccacagaagaacaattgcacaaaagtttactgtagccatatgaagggaatttttatgaaccttttaaatctgctgatatacttgggaagcaagcgcatcggtggtgcgtttaaaagtctatgtggaagtaaacattttacggcatgtttgggaggaagggaaaagttagccaagattcatatttttctagggcaaatgaggtcatgcactgggttgtggctgatcttccctcccatgggatcctgtaaagattcgtgaaggccccagacactgctgttttgctactcccggagatttgtgggatttgggttaaacgcaatagtaagcattcttcctcaagacagtccaggaggcaacagccagaagatggcgccgtagctacggaaacgaagacaacagtgtccatgcgtgccctcccacagcctgaggacttgggacccaggaactgaggcagatgcatccagaacgaggctggaccttaatgcccaactggggtctaagcagcggtccccaagcttggttggcacagtggctcacacatgcaatcccagcactttgggaggctgaggtgggaggatcgctggagcccaggagttcaagacctgactgggcaagacccgggtctaagcagaaggcaaaaagagaccccttcttccttctcctgatccacagccctgcctggagctttcagcagaagcgtaataggataccagagttgctctgtgtttctgtgtggtctcagcgggaaggcagtccttgttcaagtggacattcgccatttagactgttaaaattgcttcttcctctcagatcctggttttctttaaggcacttgtgtccccttgtccgggcttgacccatcaggatccttaacccaggccctggagggagccctctcattgcagtcctggtgtctggacttgcggctaccacaccacatgatgtctcaagccaccctgcttcctctgtttttcccaagctttgttctcttgcctctcttgagttgtctggtaaccttccagtaaattgccaacgtgctggtactcactggaatttgttgcagttgcctgtcagcgaagaatcttgatgggtaaagatgggtatagctccaggatgtgctactaagacaagcatcagaagtacttgcaccacacatctccaggcaaacactctgcctccagaggtccgtgatggttaatactgtcaactggattggattgaaggatgcaaactattgttcctgggtgtatatgtaagggtgttgccagaggaaattaacatttgagtcagtggactgggagagggagaccaccctcaatctgagtgggcaccatctaatcaactgccagcgtggctaggataaaagcaggcagagagacgtggaaggactagactggctgagtcttccagcctccatctttcccctgtgctggatgcttccttcccttgaatatcagactccaagttcttcagcttttagacccttgaactcacaccagtggtttgccaggggctttcgggggccttcagccacagactgttggcttccctacttttgaggtttgggactcaggctagcttccttgctcctcagcttgcagacagcctattgtgggacttcaccttgtgatcaagtaagtcaattctcctaataaactctcctttatatattcatctatcctgttagtcctgtcccttgagagaaccctgactaatacaaggtcctactgaaaaatggcctactgaatggcctactgaaaaatggtcaaataaagccatgaggaactatgatttcattatttcaaaagacagaaataatccttgggattctaagccttcacagagacagaggatagaccctatgctcttgctaggaccctttcccaagcaggattctcaggttagaagtgtcaggagccatcaaaaccaaaaggctactgtgcagaatcctagatttacttttattttattttatttttattttattttaattgtagtaaaacatacatgacatacaacttaccgttttaactattttttaagtctaaaaaatggcattaagtacattcatattgtgtgcaaccatgaccaccatgcatctccagggttcctttcatcttccgcagttgaaactctgcacccactaaacgctagttcctcattcctcttccccatctccaggcctgggcaaccactattctactttctgtctctatgtatttgactactccagatacctcatataagtggaatcatatagtatttgtctttttgtgactggattatttcacttagcagaatgtcctcagggttcactgatgttgtagtatgagtcaaaatttccttccttggctgggcatggtggctcatgcatgcaatcccagcactttgagaggtagaggagggaggatagcttaagcccagaagtttgagaccagcctgggcaagatagggagaccccatctctacaaaaagtaaaaaaatgaggtgggtgtggtggcgcatgcctttggtcttagctactcaataggctgaggcagaaggatctcttgagcctgggaggtcaaggctgcagtgagccatcattgtgtcactacactcagcctgggtcacagaatgagaccctgtccccccgacccaaaaaaaaatcctttctattccaagctgaataataatcccttgtacagatatatcacattttgcttgctcattcgtctgtcaatggacacttgagccacttccaccttttggctattaggaagaatgctgctgtgaacatgggtgtacaaatatctgcttcaggccctgttttcagttcttttggctgaatttactcttgaaggcagctgaatgtgagttgcacagccttgccattttacaggcaatctacttgaataatgtctatctgagcacttctcatgtgcagggcactatgacaggctcaagggacaacaagatggatctacatgggcatgggtccttccccaggccccaccacgaagagaagagtctccggcacagaaacgtcaggaatgatgcttacccagctcccacaggatcccagacaggagtgcaagtagctcctctaggagctctgagaacagaggggctggcatgagctggcggggcactggggatgggccatgaagggtgtcaggacatggagcagcaggaaccacccttctcgtggtaagagcctgattgtcccattagacaagctccaagataggcctttcaaaggctctcacctggagtgcccaaggaggcttctgccttgcaccctcatgggcaaggactttacatgtggtcttgaaggctggcagcaaacctcccagtggatgtgatcttgggtaagttacctatctcacgttaagttgactgagcctctatcacctcatctgaaagctcatagagcgattgtgagaactcagtgaaatcatgcgtgttaatattttagctcagtgactggccttaggaatgccctgacacagcattgactatttctctctaacctactagctccatctgagcgagaattctgttttgctcatcactgtatccctgggaactagcatagtgcccaacacttagtaggtacatagtaactattatcaaattttctaatcttcacatttaagccaccaaaaaaaggtaggcataggtgaatttacaaaacaaagtgtgttatctctcagcaaaaaatcaccctgctatgcacacttctctagcactggggctagatgcctgaaaactgcattttccatattcttttgctagctgactgactttgggctaggtttcactaatacaaagcgctggggataaaaatgaaaggcatgagaaaaggtgaaactattttccagacgcttctgtggcagaagtagcagtagcagcagtggaggagggtcagcagggaaggggacagtagccaaggcaggaacagttgtgatggcagcagcaggccagaaaatgcaggctcaggttcctgctcaggcagctcatccttaacagccatggtctcaggggcatccagccatgggattgcagcttccatagctgttactcattgggtaaattcactgcaccttttttccctcctgtcacttttctgacacctttgtaaccaactccttagattaaatgccctgttttgaaagacctggggggtgtctgactgatgggatttgaactgatacagttaactcattcttggagcaagtgtctaggggagtcagggcagcccttctcccacggccattctagcgatggtcccaccttttcatctctgcacaggagaggctgttatgaagaagcctcacagtcttccaggccccacctgagacatgccaattcacatggttaggctggttgttcattgcacagaagtgccctgctaagggtacatgcgtagctgagacctgttctccaagcctgtgcccagactgtggcactcaccttgtgggtgagggaggcctttctctaagatatacataggtagatgataaccctgctgagacaggtggggccagctcttttccaaaaagctcaaagcccctagcgccctcccaaacacccgcagggtcgctttctgggctgactcggacatttcagaggaaaagcatttcggtcaggattaaagaataattccacttaggcagaggccaggccagacttaagcaaattccagacacagcagagcttctgatgcggcctcaaacctggctctccattgctcaaaacatctccaggcctccctcctattgtgtatgagtttccactgggaaattgacctatttctgccctcacaaagctcctcagcagttggacctgcagcagccagaaatctgtctccatgtctcctcttactaaatgaagaacccagaagactgtaccaagccccccctccacctcaaatcactagctccccaggctgggccttggtagcacccactgttttccaggcatctgtgtccacactacatttttgaagggcttcaggtgcctctgataaaatgctatcaaatgaaaaaagccacccatctttgggctccctaacccttgcagaactcaacatttcttttcctgttgatggggagaagcaacaccacccactgagttcactgaaaccgaggcttccatattcccgcaggagagtgctcgtatgcttaaaaccctcgccatatgtgtcgatttaaatggaaaccaaacggggaaggattctgacgacagtctgtcactgactggagcgctacttcctccagttaatttatgtcttccgtaatcacattgaggctttttaaaaggctctacctgtgacggcattttttttcccccatacgttcacattcaaaggtccctggcccatgcgctaatcgtcattttaagacacctcacgctccgagcactttatcttcccagctctttacctgtattaattaattagtgctataaatacaaccagcacatgactactctggagctaatcagtcactgacacggctcaggacctggaggaaaattaggaaaattgaatctttccaaaagttgggcctatgcgaggtaacttagtcaatcgtgtcctgagggtcagtggggaccaactgatttaggctccgcctgggtagaaaagcaatttcctgaacagcaagtcagcaacgctagttaaagtgattctgacctgttataagtaaagcatgaattctgttttcctgctggttgggtgcacgaccacttactgagggcctggtgctggcacagccctcatcctcggctgtacaaggaatgtcagaagacagtgtcaggcctttcccactacctttttatggtggagttaaagagagccaccatgcattctagggtttgaaacatcaatcccaaaaaccaagcaagggaaatcaggggacttggggttgacataaagtattagagattctctgagtcattcaaaaaaatattgaacatctacgatgtgttgcatggccaagacgctaagatacttgatgtctattctttcttttacttatttatttgagatagggtctcactctataaccgaggctggagtgcagtgatgcaatcatggctcactgcagcctcgacctccggggctcaggtgatcctcccacctcagcctcctgggtagctgggactacaggtgcacgccaccatgcctggctaattttagttttttgtttttttgtttttttgttttttttcgtagagatggagtttttgccatgtttttcaggctggtctcgaactcctggactcaagtgatctcctaccttggcctcccaaagtgctgggattaccagcctgagccacgttgcccagccttgatacatatttttaaagggcttacagccactgaggaagacagatttgcaaaccacaagaaacatacccaagaatccacaatgctcagaattcaaggtgtagaatatccaacaaaaggatattcttttttttttaatattttatttccttaggttattggggaacagatggtgtttggttacatgagtaagttgtttagtggtgatttgtgagatttgggtgcacccatctcccaagcagtacacactgcacccaatttgtagtcttttatccctcatccgcttcccaccctttccccttgagtctccagagtccactgtgtcattcttatgcttttgcatcctcatagcttagctcccgcttatgagtgaaaacatacgatgtttggttttccattcctgagttacttcacttagaacaaaaggatattctaaactgcccaatttatctggtcattggcctgcctagaaaggaggctggaagaaaagaactcttgattcgatcataggcctcgaggactcttcttagtgctatccagcactgtttatgtttagcttgcaccttcactctgagtttctgggtccaaattccgggtttggccctggggagttctcctccacactaagctttggcctggcctacagacctcttgtcctggggctggcctccttgtgggtcacaggcaaacagggctaaatgggagtgagatctagtgagactgaatccctgaggctgatctaggaacctcatttctctagctcagtttcttaatttcttgttaactgcaaaataaagagctcatctcacgcagagttttcacatgaaacaggagctgcaggctgttgtttatatctgtgagtagatcacagatctactgcatctcaaaaaataaataaataaataaaaatcaacaacagtgttaagtttagtttaaaagaagccttgaatgtacagggtgggagagctggattctgcctgattagggtggagagtggagggggtgggcaggaggtcaagaggaattttggaagaggtccatttccaacaggcagggttaagcagtgctaggggagggaacactgcagggtacaggaaccaatgtgggcaaggacaggaatgggcagggcatgctgaggagtgatgagtgggagcccactttcaacacccatcccgaaaaggctctcggacttccgcactttatagatttcatttcctccttcagtgtcccaatccctcattcctcacccagtcaagtgtcttacaacagcagtgaaagcagcgacaggtttccctgggagccagcctgcagggaaatgatctctttatgtctcctgtggcttcctgcccttctgcactctcatggtccagctctattctgaggcagtccctctgggtggctatgaataggtgtgttttattcttgcatccttggtgcgacaagccaccctccgatagtttgcttctgctcctcatgaaagagtccaaaatgtccaaagacaagggttccacccatccacatagaaggaaaagtcctacgactggacaaaggcattctgagcaggtacaggttgaagactgtgaaattgaccaaggaaggtgccaatttgaattttcttaaagtttttcactccactgtaacaatgtattctcaggcgagagggggctctagacaccaagtggagcttgtgagagacacccattgaggctgttcaggaaacagacaccacagcctgcctgtggatgcttcctcaaatttcaccttcttggaaaagacaccattctgttggtgcacagccaaggccgcctctgctttctggaaggtgactctctcttttagggatctttaggaatcccagcaactgccctgtgctgtgcacaaacctcaacatccaccaacacacagaaatcctgctacctcctggccacttttctattccacatcccatagcaaaaaaatttattgaagtaggattgacaaacagaaattgtatatatttaaggtatacaacataatgattcatatatatatttatatttatatatatatatacatatagtgaaaatatttccacaatcaagctaattaacaaatccatcacttcccatagttacccttttgtgtggggggttgggggggtgagaacatttaatatctactctcttagcaaatttcaagtgtgtgatacattattattaactagtcaccatggtgactatggattagtctatggttagtcaccattctgtactatggtgactatggatagtcaccatgctgtacgttagatccccaggacttatccatcctatataactaaaattttataccttttgaccaatatctcccccttgctcccacccctctagcccctggtaagcaccattctactctctgtttctatgtgtttaacttggttagattccacatataagtgaggtcacgcggtatttgactttctctgcctagcttattcacttagcataatgtcctccacattcatccatgttgtgataaatggcaggctctccttttttaaggctgaataatattccattgtacgtaagtatgtctgtgtacgtgttgtatgtgtatgtgtgtatacacatgtgtatgtatatacacatacaacagacatacatatacacattgacatacaagacacacacagcagtttctttatccatttaactattgtcttagtcttttttctcttgctataacaaaataccacagactgggtaatttacaataaacaaaaatttattggcttacagtttgggaggctgcaaagtccagtatcaaggtgctggcatcttgcaaggaccttcttgatacatcatcccatggtggaagagcaaaaaggcaagaatgggtgagagaggcaaaagaaagcccaactcatacttttataaggaacctgctttcgcaatgataaatctactcccaagatggcagcattaatccattaatccaatagaatcctcatggcctaataacctctcattaggccccacctctcaacactgttgcattggggattaagtttccaacacatgcttttccaacacattcaaaccataccaactgtcagtggacacttccagatcttggcttttatggataaagttatttccagatcttgacttttatggataaagctgcaattaagtgggagtgcagatatctctattaggtcataattttcttttctgtttttttagatggagcttcactctgtcatccaggttgtagtgcagtggcacaatcttggctggctgcaaactccacctcctgggttcaagccattcttctgcctcagcctcccgagtagctgggattacaggtgcccaccaccacacctggctaatttttgtatttttagtagagtcagggtttcaccatgttggccaggctgatctcaaactcctgacctcaagtgatctgcctgcctcagcctcccaaagtgctgggattacaggcatgagccaccgcacccagccaacgttgtaattttatttctttctgggtcatatagtagttccatttttaattgctttaggaaccttcatactattttccctaatggctacaccaatctactttcccactaacaatatacaagggttcacttttctccacattcttgccaacacctatctctgcctttttgataatagccttcctaacagctatgagataatatcttatcgtgattttgatttgcagttccctgacagtgatgttaagcacctttttatatgcctgttggccattatgtcttctttggacaaatgtctattcaggtcctttgcccattttaaaatcaggttatttgtttttttactattgagttattgagccctttatatattttggatattaaccctttatcagatatatggcttgtaaatattttctcccaatacatatgctaccttttcattttgttaattgtttctttactgtgcagaagcttttcagtttgatatagtcccatttatttaattttcttttatagcctgagcttctggtgtcatatccaaaataatcattgccaagacccatgtgaagaagcttttcccctacattttcttttaagagttttatgatttcaggccaggcgcgctggctcacgcctgtaatcctagcactttgggaggccgaggcaggtggatcacaaggtcaaaagatcaagaccatcctggttaacatggtgaaaccccatctctactaaaaatacaaaaaattcaccgggcgtggtggcacgtgcctgtagtgtagtcccagctactcaggaggctgagacaggagaatcacttgaacccaggaggcagaggttgcagtgagctgagatcatgagatcatgccactgcactccagcctgggcaacagagcaagactccgtctaaaaaaaaaaaaaaaaaacgaattttatgatttcaggtcttatgtttaagtccttaatccattttgagttgatttttgtgtatggcataagaataaggattcattatcattcttttgtatgtgaatattcagtttctccagcaacatttaatgaagtgattgtcctttctcattgtttattcttgttgtttttgtcaaagattagttgatcatatacttgtgagtgaatttctgggctctctattctgttccattgatttatgtttctgtttttatgccagtaccatactgttttgattactatagctttgtaatataagttgaaatcagaaagtttgatgcctgcagctatgttcttctttcttaaaactgctttagctatttgggatcttttgtggttcctacaaatttaagattgttttttatatttctatgaaaaatgccattggaattttgatagggattgcactgaaattttaggtcactttggatatatggacattttaataatattaattcttccaatgcataaaacacaggatatctttccatttatttgtgtcttctttaatttctttcatcaacattttatagttttcagtgtacagatctttcacctccttggatacatttagtcctaagtattttattctttttgatgctgtcataaaaggaattttttttaatttctttttctagtagtttgtttttagtgtatagaaacaattgatttttgtatgttgattttgtattctgcaactttacttaattcatttattctaacagttttttggggatgtctttagggttttctatatataaaatcatgtcatctgcagagaaaatttaacttcttcctttctgatttggatgccttttatttctatttcttgcccaagtgctctagctagaatttccagtactttgttgaatagaagtggatagagtggacatccttgtcttattcctgatattagaggaaatgattcagcttttcactgttgagtttaatgttatctgtgggcttgtcatatatggcctttattatgttgaggtgcattccttctacacctaatttgttgagagtttttatcatgaaattatgttgaattttgtcaaatgcttttttgctcttattgagacgatcatatggtttttatctttaattctgttaatatcatgtatcacatttattggttcgtgtacattgaactatccttgcatcctggggataaattccatttgatcatggtatatgagtttttgtgtgctattgaattcagtttgctagtattttattgaggattttggcatttattttcatcagagatgttggaaagtaattttttcttataatctccttgtctggctcctctattaggtaatgctgggcttctgaaatgagtttggaagtatttccttttcttcaatttttggtagagtttgaaaattgctataaattcttttttttaagtttggtagaattcaccagtaaagccatctgtctatgggcttttctttgctgggagatttttcattacagattcaatttccttgtttttcattgatccattcatattttctattactttataattcagtctcaatatgttctattgtttctctaatcactatttcatttatttctgctctgatctttgttatttcctttcttctgcttacttatgttgggcttagtttgttctttttctagtcccttgagataaagttaagttgtttatttgagatcttcactccttcttaatgttaagtaagtatttatcgataaaaatttccctcttaaactgcttttgctgcatcccataaattttggtatatttcatttccattttgtttatctcaattttttaaaaaaatttcttctttaacccattggttgtcactatgatctgaatatttgcatcccccttgaaaccctaaccaataccaatatggtattgggcggcgggtgggaggcctttggaatgcagagccctcatgattaggattagtgcccttataaaagagacgtcaccaagctagctagccccttcctccatgtgaagttacagtgaaaaaacattagtctatggagaaagcaggccctcaccagacattgaaactttcattgccttgatcttggacttaacctccagaactgtgagaaatatgtttattgttgataagctacctagtttatgctactttactagaaatgcctgagcaacctaagacagttgttcagaagtggtgttcaatttccacatatttgttaatttttccagtattcctcttgttgttaatttctagttttataccactgtagtcagaagagatacttaatatgatttcaatattcttaacatttttcaagacttgttttgtgacctaacatatgatctatcctagagaatattccatgtgtgcttaacaagaatgtgtatttggttgctgttggatacagtgtcctgtatatgtctgttaggtttatttggtctaaggttcagtttaagtccaatgttccttatttattttatatctggatgatctgtctgtttttttaaaatggggtattgaagttccccttctattattgtattgctgtctatttctcccttcagatctgttaatatttgctttatatatttaggtgttccaatgcttaaggcatatatattgtcatattctcttgataaattgatccctttatcattatataatgaccttatttgtctcttgtgacagttttttacttaaagtctatatttttctgatttacctatagccactcctgctttcttttggttaccatttgcctagaatatattttttcatcccttcactttccgtgtgtctcttgtaggcagcatataattaaatctttttttttttttgagacagagtctcagtctgttgccaaggttggagtgcagtggcatgatcttggctcactgcaacctctgccaaccaggttcaagcgattctcctgcctcagcctcccgagtagctgggattacaggtgcctgtaccacagcacctggctaatttttgtagttttagtagcgatggggtttcaccatcttggccaggctggtcttgaactcctgacctcgtgatccaccttcctcggcctcccaaagtgcagggattacaggcatgagccacggtgcctggcaaaattaaatcttttttaaaaaaatccagtcagccactgtatgtcttttgattggagaaattaacccacttacatttacagcaattattgataggtaattacttcctattcccattttgttaattgttttctaactattctgtaattttgtttctttcttcctctcttgacatcttcttttgtgatttgatggtttctataatggcatgctttgatttctttctttttatcttctatgtatctactaaggctttgctttgtggttaccatggggcttacatgaaacatcttataattagataaatctattttaagctgataacaacttaactttgatcacatacaaaaactctacacttttacttctctcctcacattttatgcttttgatgtcacaatttacttatttttatattgtgagtccattaacaaatcattgtagctatagttatttttcatacttttgatttatacaccaccattacagtatacaagtattctgaatttgagtacagatagtccctgacttacaataattcaactaatgatgcttcaactttacagtggtccaaaagcaatacacacttagaaagaaaaataaaacaaaacaaaaaatttcagtatagtattcaagcaattacatgagatattcaacactactataaaataggctttgtgttagattattttgcccaactttaggctaacataagtattctagatatgtttaagctataacattcagtgagttgagtgtattaaatgcattttcaacttataatgttttcaacttttgatggttttatcaggacataaccccatcataagtcaaggagcatttatatatacttacctttaccattaagttttatacttttatacgtttcatgttacaaatgagtgtcctttcatttcagcttgaagaatttcttcagttgttttttttttttttttttagacagagtctcgctctgtcaccaggctggagtgcagtggcatgatctcggctcactgcagcctccacctcccaggttcaagtgatttctcctgcctcagcctcccacgtagctgagactacaggtgtgtgccaccacgcctggctaatttttgtatttttaggagagatggggtttcactatgttggccaggatggtcttgatctcctgatctcgtgatccacccacctcggcttcccaaagtgctgggattataggtgtgagccaccgcacctggccttcttcagtatttcttataaggcaggtctagcagtgatgaactcctccagtttttgtgtgtctgggaaagtttttatctctccctcatttctgaaggatagcttttccaggtaaattgtccttagttggtaggttttttttcttttagcacattgaatacaatatatttgactatatcctactctctcctggtctgcaaagtttttgctgagaaatctgctgataaccttatgggggttcccttgtatgtgacccatctattttctcttgactctttcaaaattctctttgtctttgatttttgacaatttgactacagtgttccccactgaagtcttctttagattgaatctgtttggggacctttgatcaccatgtatgtggctgtccatatctctcccactatttgaaaagttttagccattatttctttaaataagcttttgcccctttctctctctcttttccttgtaagatttccatagtgtggaaattttatttctcttggtgatgtctcattaattctgtaagttttcttcattccttttcattcttttttctcctctgactggataatttcaaatgacctgccttcaaattcacatattctttcttctgcttgatcaagcctgctgttgaagctctctattgcatttttgcattccattcattgttttcttcagccccataatttctgtttggtacttttgtgatttctttctctttgttgaatttgttcggttcatgtattattcttctgatttcattgagttgtctatctgtattctcttataggtaggtgagctttcttaagacaattattttgaattatttgtcaggcactttttatagatcttcatttctttggggtcagttactggaaaattactgtgttcctttggtggtgttatatttccctggttgtttgtttgtttgttttttatgttcctttaagtcttgcattgatgtctttccgcttgaagaagcagtcacccctctgacttgctttgggagacaaatgccttcaccagtaaacctgattagaaattccaagccctctcagacatttttaatgaaagcatccattccacccttcttgtttcctcttaggttggatggaattcttaagattgtatgccttctttcaattttaaagccatgctgggtgttgagaacctccctcatttcccatatgacagtgttttgaaatgcttaaatttgtgtgccttctcccaatttcccagagtcaagctggctgactatacatgcttgttagccaactgcaaaggctaacactcactttccaggggtacacacagggagccagccatgggtggagagataggtgaggtgtttggagcattgaggtgtccatgggtcaactggaggatctgcaggtgaggcatcccaaacagcttgtgggcaggcttcctgatggattctgcaaagcagttagtaggattgtggccctttgttgagtcccatgtcctagttactgtgagtctccacctctttttcctactcccagcttctcccagctactcaccatacttatgtcctcagtattctagacaagtatgacaggcaagaaaaagatgagcctcttggacagcattccacgcagctgtggaacctgggcactcactcattgctctcattttttcctgtgggaggaattgcaggtgagggaatctcttctgtcattgagctgtgaccccatggtggagggaagatgctggtaaagtaaagatgttcttaccctcttgaatgcatctgttctcagattttatgattcaactgtgtgctggaacttctcccactggactctcagattcccacagaggtactcttatctttgggtgactgtcaaaatcagtgccctatagataaatgatgatagaaaattcctattccaccatcttgctgacatcattgtcttccatttgttttctgttctgaagtttcctatgctctctagggctgcttctcaaggccacctgcccacatcattggtgccttctctcaactgcccatggtttctgcaagattgcccatgaaactgtgttgtagtccagctcttatgctctcagaacaagaaacctagaataataaaaataccagatttaagcccagaatccacttcagcagcactcagatcttccaaatgaagaaagctaattatctgcacccactcttccttaaaacagcaacattcaaaaagaagtgagcagctcctctccaaagatgtgtaagcagaggcacaggaactatctgttctcagccaaagatattctagccttgtgctactaccaatgtggtccatggaccagctgcataagcatcacctgggatgcatcagaaatgcagaatcttgttagaaatgctccctccactccagatctactgaattagagtctgcactttatcaagatccccagatgatgcatgtacatattaagggttgagaagtgttagttcccagccacagcagcacattagaataaccttggcaactttagtttttaaacgtcaacacccaggccccatccacaaccaagtaaatcagactctctgtgagtggggcccagacatctgaattttaaatgttcccaatgggattctaatgtggcctgagtgagaacttcccatgaagattccttcacttcatacccagctagacttgagaaattttccttctcttctttgttgctttttcataggtaatatgtgcacataacttttttaaagtcaaagaatataggccgggcatggtggctcatgcctgcaatcccagcactttgggaggccgagtcgcgcaaatcacttgaggtcaagagtttgagactagcctagccaaaatggtgaaaccccgtgtctactgaaaataaaataaaataaaataaattagccaggtatggtggtgcacgcctatagtaccagctacttggaaggctgaaatgggaggatcacttgaacccgggaggcagaggttgcagtgagccaagatctcaccactgcactccagcctgggtgacagagaagactctgtctcaaaataaataaacaaataaataagtaaataaataaaagtcaatataaactagtgtacagtgaaaagaaagtctctctccatctctaaattttagtgccccaatttcctctccaaaatcaaccactgttaccagtttttgtgtctgtgtgtgtgtgtgcccttccagagcttttctgctttgcttttttcttttctttttttttttttttttttttttgagacagagccttgctctgttgcccaggctggagtgcagtggcgttatctcagctcactgcaacctccacctcccaggttcaagctattcttctgcctcagcctcctgagtagctaggactacaggcaagtgccaccatgctcagctaatttatatatatatatatatatatatatatatatatatatatatatatatatataatttttttttgtatttttagtagagacggggtttcaccatattgcccaggctggtctcaaactcctgaccttgtgatcctcccacctctgtctcccaaagtgctgggattacaggcgtgagcccccgcgcctggccctcccagagcttttctatgaatgatcaaacacaatcaagtacagacacccttcttctttatatatagtagtattatactatatatgctgttctgtatcttgctattttcactcaacactctatcttagacattgtcccacagcagtaattgtgtctcaattctttttgacagatacatactattctattgtatcaatgtagcatcatttattaatcaatctccaattaatgtacattcaggatatttccaattttttcttactacaaataatctgcaatgaataatacataaaacagtacacacttaagtcactctttccctcttttcctactttttttcaaagcactcgtcaacaccacctcagggtagccacatcatttatcatacagactggaacacttcttttttttttttttttgagatggagtcttgctctgtctcccaggctggagtgcagtggcatgacctcggctcaccacatcctccacctcccagattcaagcaattctcctgcctcagcttccctacacctgtagctgggactacaggtgtccacgaccatgcccagctaatttttgtatttttagtagagacagggtttaactatgttagccaggctggtcttgaactcctgacctcaagtgatctgaccacctcaacctccccgagtgctgagattacaggcgtgagccaccgtgcctggcccagactggaacacttctgagagcagaaaggggcactaacagttctactagaacatacctatgactatgccaggcaactgggatacatgggcatcctatatgatttattatgcattccctatttatttctttattgtctgcttctcccactcgaatgtaagctcctggagggtaaaaactagtctgtcttcctcataactgtttctctagagccctgaacagtgcctggaatgcagtggtacctcattaaatgtttgatgaatgactaaacgaattaaaattaaatatctctgaatagcatcattagcacatgtgtaagaatatcattaagataaattcctaaaagttgaatgattgcatcaaaaggtatgtgcttttttttttttttttttttgagatgagatctcactatgttgccttggctggattggctctgaactcctgggcttaagctatccttctgcttcagtctcccaagtagctggtagtatatgcatcttatattttagtaaatatgactgtattgtactccatggagtatgtactaattagcactcccaccaacaatgagagtgggacatctccctccctcaatctgcatggcctgcgtgtgtgcatgtgtgtgcaaatgtgcatgtgtgtgcaaatgttcacgtgctcacacatccatactcagtgtgctccacacacaggcacacagagacctgctaccacagtgctgccaggacaagcactgaaacttctgactccccagggacacagattctggtgctgggagaggagaaggaggcccctcacactctcgatcaagggtgtttgttcatcctctcttctctccccgccaccgtacacttcccagacaggatcaacatttgcaaattaccttccaggactctgactatgagacacagcatggcagcacctagttcaggcctagctcaataaatgtttaattaattaatcaatcaagccaaatcaaagattaggttgattatccagatatctttatctatgtggaagtaggcaactggttaattgctttttctcttttgtaaaattttgtactgaaatgataataatatatttgagaattgcacagatatgacctcaaaggtcaaaagcctggtaagtatgaaatattcccagggtgtccccaggggcagactgctgcgaaagcaattatcattatcctaggagtcaatgccttggtgttgccatgatgctgaggtagaaaattctctggcttatgatggaataactaaaatccacaaatatggtctgttacaggaaggggttccgatccagacctcaagagagtgttcttggatctcgtacaagaaaaaattcagggagagtccacggtgcaaagcaagtttatttaaaaagtacaggaataaaagaatggctactccatagacagaacagccccaagcactgctggttgcccatttttatggttatttctcgatgatatgctaaacaagggtggattattcatgccctcccctttttagaccatagagggtaacttcctgacgttgccatggcatttgtaaactgtcatggcgctggtgggagagtagtggtgaggatgatcagaggtcactctcatagccatcttggttttggtgggttttagccagcttcttgactgcagcctgttttgtcagcaaggcctttatgatctgtatcttgtgctgacctcctgtcttatcttgtgacttagaatgccttaaccatctgggaatacagcccagtaggtttcagcctcattttacccagcccctactcaagatggggttgctgtggttcatacgcctctgacgattttccccactgtggctgtccatacatatgctgatcatgaggacaaaggaatgggttattgcataagattcttaaccgtgcctctccctgtgggattccagcagaatctgggcatgccacagctctgtgagaaaatattaggttgaggccgggtgcagtggctcctgtaatcccagcactttgggaggcagaggcaggtggataatttgaggccaggagttcaagaccagcctggccaacatggcgaaaccccatctctactaaaaatacaaaaattagccaggcgtggtggcacgcatctgtagtcccagctactcaggaggctgaggcaggagaatcgcttgaacccgggaggcggaggttgcagtgaactaaaatcgcaccactgcactgcagtctgagcaatgaagtaagactccatctcataaaaagaaaagaaaaagaaaaaaaagaaaatattatgttgggtaaagtgtaggaaagtgaaaatctggtcatcaaacaactgcaatgaggagagatgcagtgtggttactgtgcttcatagatttcccacggagagtggtgatttctacgaaaccccatccaagagccctgtgggcatcccatgttcgtatccctaagttcctcatgtcgtcacttaagagccataaattatctgccttactttcatttacagatcagaaggtgctaagatttttgtgccattgcattttgctgcaggaactagactagggctttttggatattaatctggttaaaattgtgctcttggcggatttgggatggaataaaataacagcatcccgagggccttctctgcaaaatccacaaccaggcgcccagggcggatacatccagaacctgccactcccctgtcgccggcagcagctcagtctaaactggcccgggacctccggaaggtgcagtctgcagagcgggaagccctagcaggttcaatacaactagaaattttggggtaacttccagaagctggaaaaaataattcacaagttccccttactttctaaagatttgcctttgatttttaaaacgctcttttgggtcgagttggatcactcactcacacattcgtctgggaggcagtgatctggcagcagcccatgcctcagaggctgccaggaggactccagcggctcatcgaggcctccgattccttgcagtctgagccggagcgcagagatgcgtgatcccgaccataagcgctgccttcacaggctgtcggggagtgtgaaccggggacagcagagctggctggcagccccgcagtagccacttcctcctccacccgcacgatgcaaacactcagaaagatcaatagctgttgcttcagaatttccctctgctcaacgttgtcaacacatgttcagccacactcagtgtgtgtataagtccacaaatacccgagccaacaaacacattgatcacacgtcgatcttcacggtcgactcaacacctttcaatggtgcaacacatcccagcggagggcaaacttgggcccagctaaggatggatgcccgcaggctcccaaggggtccaagtctaatcaagattcactaaggctttggggatgctaatctggggacattgcaaccatgcagggacatttgtgccatcttcaggcccggatcgcttatgagggaacatgcctccagggtctggataacagatcacatatcagaaagcacagaagtaggccaggcacagtggctcacacctgtaatcctagcaatttgggaggccaaggcgagtggaccacttgaggccaggagttcaagaccagcctgggcagcatggtgaaaccccatctctactaaaaatacaaaaattagccaggcatggtggcacatgcctgtaatcccagctacccgggaggctgaggcaagagaatcacttgaacccaggaggctgaggcaagagaatcacttgaacccgggaggtagaggttgcagtgagccgagatcacgccactgcactccagccttggcaacagagcgagatctgtctcaaaaaaaaaaagaaaagaaaagaaaagaaaagcacggaaatagtgtccagagaggcagcacctggaggcatgggctctagaacaggcatatgccttctggagaactcatgtttttagccatgacgcgtcttccatcaagtgccacaggacgacctcttaacaggtggcagctccagaacaactcggttccaaattacctgtgtctgtctgtgttaaaaagaagaggcagcactgtctttcctggggactctaaccaacagcctcatgagcactatggaaggaacccaactttggcaatacataggcttggggtccagctctggctgtgccgtaaatagctgggtagccttgaccaggtttcagaaccccttggagctttgatttcttaatctctaaaatggggatgatagcattcactccctctagtttgttgtgggaattaaagaagacgcgtataaaacgtttaggactcaacaggagggcggcacgtagaggggcaggaagaggccaacagtcaacccactgtgcagggaaactcggccttcctgtggtctttcctcctgcagggcaaccttccccaggaccctctggaaagcagaggtcagaccaatgtgcttctgtaaagtatcatagccttgagattgaccttgaacgtaagagtgcatcatggacatgcagtgagattggggataaggtagtgcatgggcagcatgcagaggaggcttgggttgggaggaataagaagaaaaccttgtgctaagtgcacccatcccacacacgcagctcatagacaggaactgatgggtgacctcctggaggatgctatcgtggtgcctacgaatctcactggagtgtcctcagcagacactcccacccctgatcttcacgcccacattatggaccttccacaacagaccccacatgcacaacaaggcacgaggagggtgaggactggccctgtgcaggttgccagccagctccccttatccctgcagtatcttcctttttttttaatttttatttttttgagacagagtcttgctctgtcatccaggctggagtgcagtggtgcaatctcggctcactgcaacctccaccttctgggttcaagcgattctcctgcctcagcctcccaagtagctaagataacagatgtgcagcaccacacctgactaatttttgtatttttagtagtgatggggtttcaccatgttggccaagctggtctcgaactcctgacctcaagtgatccgcccgcctcggcctcccaaagtgctgggattacaagtatcttctgagactgctgtaaaaccagtggggactcctggacacctcgtatggccccagggaggagctccagccctgcacggggatgaactgagtggactttggcacacgtaggtggggtacacacaccccatcacacaggcagttgagaacatcgcctatcatcgctgttcaggtccaggaggtcggacttggacacacgatggggaagctgccaggcaagttcccagggcagaaaagcagacattgaaagacgcttctgagaaaccaatttgggaatctgtgtgatatgatatagatgagacaaaagggagaaatgtcattttgcacttcttcctggagaaaaactaaacgtatttagaggaaagactttgataagctgcctatggtttggggatgacactgcagaagcctgttgaagtaataaagatggcattttgaaaataataataaaaactggccaggctcagtggctcaggcatgtgatcccagcactttgcggggggtggatcacctgaggtcaggagttcgaggacagcctggccaacatgatgaaaccctgtctctactaaaaatacaaaaattagcagagcgtggtggcatgtgcctgtaatcccagctactcaggaggctgaggcacgagaatcgcttgaacccaggaggtggaggttgcagtgagccgagatcgcaccactgcattccagcctgggtgacagcgtgagattctgtctcaaaaaatatatatataaataaataaatgataaaaataaggatggcaatcaatctgcctcctaaagagaatcctgttatctggggcgggtagggggaggggcaggcagtgctttgttttattgggtttaggattgtgagtttgaggataagacggagggaagagcttaacagttggacatagagagtagaaaggctttgcaccctggcacgatgaagagccaggtgattggacactgtctaaaggacagttgggaatgaccaagagtggccattggtagccaggaattttcactgaggatgttacaaagtctttgagtcgtgaccctaaaaacaaaactttttccctactcacaacatttctggcacaaaatgtgtgcattttccacatcaagtcattttccagttctctgaagacaccaactgggtacccagtgattcatttcaattctgaccttagctacctggagatgatatcagacctcatacgactgcctcccacgtcacacaccaattgcaagtagggggtcttcaggttgcccacacttctttctgtctgacttggctacaaatcaggggttcccatagccccctcttcgataattcaataatttgctaccataataataataattagaaaataaaggttcaataatttgctgtaacagctcacagaactcagggaaacgctttacttactgttaccagttaactataaagcatataaataaagagtcagatgactaagtatgtagggagaggtctggaaggggcaggaagtccgtaggagcttctgtccccatggagctagctggggtatgccaccctcccggcacatggatgtgttcatcaacccagaggcttgtcagctcccattgttcaagtttttagagcttaacctccagtctgcttcccagaggtcaatgtgtgggaatgaaagttccagtcctcaaattacttggtctttctggtgaccagaaaagctgatctttctggcaacccaagctaaggctgtctagggatcccagactaagctacatcattagcataaattcatgggaccaaagaggctgattatgattaacaaaagactctcctatcactcaggaaattccaagagttttaagatctctgtgccaagaactgggaacaaagaccaactatatttcttatactatcgccttctctgccgaccagggatcattcatgcttttgtgggtaaggacttttggagcgtgtgggaacaatgtctaggttgatgtgtgagcaaaacacacacaacatgcctagacacaggagccaggggatgagggcagagctgctatctatgctgtagcaggagccagaggcttggatacagacccagctctgcagctcatgattttcataagcagccgaaatcagaccactgcactccagcccgggcaacagagtgagactctgtctcaagtaaataaataaataataaaaatgaagatggccttcaatcttcaatcaaaaaatcatctgccttctaaggagaatcctgttaactggggcggaatgggtgctttgtttcattgggtttgggattgtgagttagaggataggactgcaggaagagctgaacagttgggcaaagagaggagaaaggttttgcaccctggcacaatgaagaggcaggtgattgggcactgtctagaggacagttgggaatgaccaagaggctctggaaaagccccttcccctctctgggttttatttatttactcaaccctaaaatgggctcatgcgtttccaaccatcacattctaggattctgacttaagttcagcactctccacaatgcaaagtggggtgatagcatttattaacagagcatttgtgcattgatatggaatgtacttgctgcatccccacataatgaattttctcacaaattatatatgctaagaactgctcagattaaactgtaagatcacatcagatgcactattgattttcgttattttagttttctccatccctgagttttctgcaatttatccgccaatttcagcagaacaatctctgcctcctctttctagtaatcagttcataaaacttcagaacttgggagtttgaggaactaggctagtttggatacaatacctgtccttctacagggatgatgactgtggacctcctggagtcagtagggattcctctggctagagcagtagatgtctttcaatggcaacgtgaatcaacagccatgcctgtatacacactcttcttatgaaataaggaaggctggacactgtggctcatacccatagtgccagcactttgggaggccgaggagggaggatggcttgagcccagaagtctgagaccagcccaggcgacatggtgaaaccccacctctacaaaaaaatacaaaaattcaccgggcatggtggcatgaacctgtagtcccagctacctgggaggctgaggtgggaggatcgcttcagcctgagaggttgaggctgcagtgagccaagatcacgccattgtactccagcctggtcaacagagcaagaccatgactcaaaaaatagtaataaaataaaagaaagaaagcaacttctgttatgaaaaaatatcctgctaatgcacaaatgctttatccctctattattatagctgcccactggggaacactagcagcgcttctccatggacgctctctggggtgcccagtttcccatccattttgcccttttgaccctgtttccttgcaatgactaggccgtacagtttctaggcagccccagttccctcaaaagggcaagcaaggtaattttccagcaaaggaggcccctcctgactttgcaagggccatgtagggagctgagatcctcgggtgtccttttcagaatctctcctctgattcattgtcatcccagaacagattagctctgcaaacaaacaccaaattattaaaattggacactgctctgcctctgacatgggaaacggttacagatagctttgtatagaatgacttctatgacagagcaacaagatgtacaactccaaggctattaaaaacaaagcaagatgaaaagcaaaaccagaagggctgctcacccaaaaactttcacgggaacagcaaagaagtcaagggattattcatgagaaaaagaccacaaatagagaaacactcaatggcttaaagtgtgagccttggagacttgcaatgagctcattcatcactcacttacttttgtacaaagggccgagcgctgtcctaagtgctggatcccccacaactgagaacaaccaacaagatcctaactcctctgacatttaaatacctgtagggggccaggcgccatggctcacgcctataaacccagcactttcttgagtccaggagtttaagagcagcctgggcaatatggagaaaccctgtatctaccaaaagtacaaaaaaaaaattgccagatgtaatagcatccacctgtagtcccagctactcgggaggctggggtgagaggatcacttgagcctgggaggtagaggttgttgtgaaacaagatcaagccactgcactccagcctgagtgacaaagtgagaccctgtctcaaaaaaaaaaaatcagtaagaggagaccaacaattaagttgtaaacatatcataaacaagatgacttcaggttggacatggtggtcacacctgtaatcccaacactttgggaggccaaggcaggaggatcacttgagaccagtagttcgagaccagcctgggcaacatagtaagaccctgtctctacaaaaaataatttttaaaaattagtttttaaaaaagataacttcagaaagttgtaaattctattaagagaacacaacagaatagagtgattgagagatattggcagggtcacagacgccactcctataccctgggtgtttaggaaaagcctctcaggatgtgacattcaagtggggtgcagagaagcaaaaaaactcaggctaactcctggaggattttggcttgagcaactccagtgaaaatgaattatcagtgtgtcaggatgaatgataaaccctttccattattcttgggagggacacaaagtattctttttgttttgtcgggagtttaggagccaactcgttagaaatgtaagcggtggcaacattccactctgcaacctgagaaatacttgagctcttctttgcatatgatgatttttaacctatttcttcagaaaaacaaactccaagcagaggttcgaaacaaatgctggcataagtgtcaacatccactttgtgaaggctcaaaggcaggccctttctctgccagaaatgtgtttctcatctgcaaagggcaggagaggccttaacccaactgtctggttgatgatccagacttcaaacttaacccagtgggtcttggagccaacttaatagagaatggagtgtctttgttgaaaactctagtgtgttttgtggaggggagtgtgcaaaagccagctgaatgtgcaagggagggatgagattatagaagaggcaaaatatcaaggaagagaaactgcaaacagattcgtgagactcgattggctgcgtagcagcaagtatcatttctgtgattcctgtaaaggaatcacacgacgacttccaagtgcatctgcttgctgtgtggatggcctctaatgagacacagtttctagccaattgggtttcacaccgctcagtgccagcttggcgatttgttttgcattaaacactgcagcctgttaacctggtgagtaactgttctggatgggcagccagaatccctcactgaactgcccttttttcttaaaagaaaaagaaaatgatgatggtgggggtggtgatgatgatgatgaaaatgcgatcaatcaggttaccatcttaaaacttgaattcattgagttaaaatgacccagataatgggccttttaaaaatattttcggccgggcgcggtggctcacgcctgtaatcccagcactttgggaggccaaggcgggcggatcacgaggtcaggagatcgagaccatcctggctaacacggtgaaaccccgtctctactaaaaatacaaaaaaattagccgggcgaggtggcgggcgcctgtagtcccagctactcgggaggctgaggcaggagaatggcgtgaaccccagggggcggaggctgcagtgagccgagattgcgccactgcactccagcgtgggcgacagcgagactccatctcaaaaaaaaaaaaaaaaaaaaaaaaaaaaaaaaaaaaaaaatattttctgggccaggcacggtggctcatgcctgtaatcccagcactttgggaggccgaggcaggtggatcacttgaggtcaggagtttgagaccagcctggccaacatggtgaaaccctgtctctactaaaaatacaaaaaattagacgggtatggtggcaggtgtctgtagtgtcagctactcgggaggtggaggcaggagaattgcttgaactcgagaggtagaagctacagtgagccgaaattgtgccactgcattccagcctgggcaacagagcaaggatccatctcaaaaaaaaaattctggaacattccagggtagtgctcaatcctcaatccatttttcagcctttctgtgccctctgctcttgctgggagaactaggcctctccgtttctttcatttcagtctcaagataatttagagttctggagtgcgcaacacacttgggaattcgacctggaggtgactgagctggggcctgggggcagtggaggggagcagtataggaacaaagacatcagacttcataaatctcaactgtaaatgtaaaagtcctcctgtgtctgacaccaccagaattgtaggatttttcttctttaggtgacaaaaatgaacggtccccagcagaagcagtctgtccatggtctctttctcattggtccaaataaacttaaaaccttgtgctaggccaagagtctggatcccaaagcacactcaccaaggctccatttgagccccccatttaccctgaaaatactgtggtcaccctccccgcattcctcctacctctttccacagcagaagggagggggtgtgtcagctgtgataccatcagccaccaatgtgtgtcaccgctccttccacaatgggacgcttgctgggaaaaacagctcattctcaagcctccttccctcgaggtcagggcagggcaatggtggggatcagtctctgcagaagaagaatcttgattttctggatttcagctgcaacttctgcttcaacaagaactatgtagagcccatcagaactattaggctgctgaaatgagttgatgaaagctatgccccatccacatgtgaaacttacagggtgataataaaaggtttccgtggcaatgacaacaaatgttttgtttctttgtttgttgcttgtttttctaggcacttccaccaggggatgcaatgaatgtttttgacctacaatgaaaaaaaaaagtcttcttagcttgcagaagtcaggaaagattgtgtgcacatgcatatgtgtttgtaggtgtttgcatagtgtacattaagtgtgaggtgtgtgtgtgtgtgtcactttcaaagtaccagaagccaaatcatctgttgattttctgacaaggtacatggtccttttcaactaccaaaaatagaaagatgaccataagcagatgaatattgtcagaaagcacacaccagacagccctgagcatttgattcagctgacattggcaactgttcacagtgagtttctgctcccatcgtggtcaagacaatcctccaagcactgtggcccctaaggccaagcccagaagttgcagggctcattggtttgacaccaatatgtgctgattaagaagctgcaccctggagaaccacaaattgttttaagcattttgtgatctaacatcttttttttttgagacagggtctcactctgtcgcccaggctggagtgcagtgctgtgatcatgactcactgcagcctcgattcccctgggttcaagcattccctcctacctcatcctcccaagtagctgggaatacaggcatgcaccgccatgcccagttatgtttttggtttggggtggctttttggtttttcattttgtttttgtggagacagggtcttgctatgttgcccaggctggtcttaaacttctgggctgaagcaatcctccagctttggcctctcaaagtgcagggattacaggcatcagccaccacacctcgcctgtgatctaacatcttaagatttcaagcaaatatgattactttccaaaagagaatacttccccagtgcttctctcaaagaacccagggttagcaagccatttgagacttgtttggtgaagtgtttgtgagatgattccataacatataaaagaaacttaatcaaggcaatatgaggctttgtgaaaattaacagacaaataacgggggctctagagttcaatgcagaggactgggctgtggccagactcccaattgcaagagggtgacacacatcagtacacaaagaagcaaccagcaggcaggtcacgtctgaaatacataaacccatgctgtccgtaatgcaattcaaagaacttgtcgtgctagaccattttacataaatattttccaacatattcaatcagccccctcaaattgacactgtcaccaacatcaaatcaatacttcttgggagggaggaataagtatcttatctaataatcaacttatttgagatctgcaatgctggctgctattaccgaaagacatttctcaattatttacatttaactatacattactttgatttttgtctcagctgcattcagataaaatgtgagcttctaatttaatttttgtctggatttcctgtgacatatctatttatgccaatttcccaggaggaaatggacatcagtaataaagatagttatagaaaacacttacaaagcacttttagcatgccagactctggtctcaagccaccatcaggattgtccacttcaatcttcaggcaagtctatgaggaggccacagattgatatccccattttatggatgatgaactggagctgagattaagtgtcttatccctgagatttgaccccggcagtctgactctagagccctgctactggcaggacatggtgattcccacttgaaatctccgcactttgggaggccaaggcaggaggatcacttgagcccaggagttcaagaccagcctaggcagcaatgcacgaccctgtctctacaaaaaattaaaaagttatctgggcatggtggtgcgtgcctgtagtcccagctacttgaggggccaaggatggaggataacttgagcctgggagttaaagactgcagtaagtttttatttatttatttatttatttatttatttttacttatttatttattttgagacagagtctcactctgctgcccaggctggagtgcagtggcacgatctcagctcactgcaacctctgcttcccagattcaagtgatcctcatgcctcagcctcccaagtagctgggattacaggcgtgcaccaccatgcctggctaatttttgtatttttagtagagatggagattcaccatgttggccaggctggtcttgaactcctggtctcaagttatccacccaccttggcctcccaaagtgttgggattacaggcatgagttaccacacccagccctgcagtgagctttgatcataccagtgggcaacagagtgagaccctgtcactaaaataaataaaataaaataaaaatagatccctgcttctaaccactgcacagtcccacttcacagtagcatgagtaattccaagcagagatttccataccattttctgctctgagtcagcagataataagagggtcatgatgttaacaccagaatggacctaagtgatgaccccatccctgaagaaggtcaaagccacttccgtctgctgttctgctctgccgtttgatttccttctaagatgtttgcccttctctaggagttttgtacaagacttgcagcctctgtctattgcattctttagacaaacggtgttttctgagttggactagaagctaaagaaaggaacatgtggatgcagtgtggcacacggatgaagcctgcctgcatcaaaaccccagctcatcctctattaacgatgccttccagtggaaggataaagtcaccgtacctcagcgtcttcatctgtataatggggatgatcataattcctctgcaatgtggggttaggaagaggaggacaagaaaccacacatgttggccaggcactgtggctcatgccagtaatcccagcactttggaaggctgaggcaggctgaggtcaggaattcgaaaccagcatggccaacatggcaaaacactgtctccattaaaaatacaaaaaaaattagctgggcgtggtggtgcacatctgtagtcccagctacttgggaggctgaggcaggggaatcacttgaacccgggaggcggaggttgcagtgagccaagaccatgccactgtactccagcctgggcaacagaatgagactctgtctgaaaagaaaagaaaaggaaagaaaagaaaagaaaagaaaagaaaagaaaccacaccacacatgtaaagagctcaccatgctcctggcacagagtaactgcttagttcttggttatgggtcacagtcaccccggagactctccctgcaccacaccctgcacagcacctgctctgggactttgttatacactctctttctctgctgttctgtgactcactcactggcctgggttgtgcctcattcatctcaggagccccagccccaacacagttcccagcccgtagctggcactcgtgaatgtctgctgattgagtgagtgactgcatatatgcactcgctgcaaccccagctcactgcgcagacgaggcggcaagttcagagggaccaagcctctaactggggccatggaactggatggtggcacagttaaagggcgactgaagctgcttgacttccagtccaatgtctgcacaccacagcaccttaacttcttgctcagtcacccaggctggagtgcagtggcacgatcctagctcactgcagcctcaacctcctgggctcaagtgatcctctcacctcagcctcccaagtagctgggaccacaggcaggctaattttattttttttatagagatagggtcaccttatgttgcccaggctggtctcacactcctgggctcaaagagatcatcccacctcggcctctcaaagcgctgggtttataggcacgagccactgctcctggcctgcaattttctttaaaatgtttttttgttttgttttgtgttttgttttgttttgttttgttttttcttgagacagagtctcgctctgtcacccaggatggagtgcagtggcgtgatctcagctcactgcagcctctgcctcctgggttcaagtgattctcctgcctcagcctccccagtagctgggattacatgtgcccgccaccatgcctggctaatttttgtatttttagcagagacggggttttgccatgttggccaggttgatttcgaactcctgacctcaggtgatccacctgcctcagcccccccaaagcactgggattacaggcgtgagccaccacacccagcctaaaatgattttatcacagactaagatcaaacggataaccagagcatcattaatatcaaactagggatacgttcacaatctatttttcctactttccataatttacatgtcagcaatccatcacaaaatgaaaaaaaagttacaaaaatacggacctaaacatttttagtgtcttgcattttaactaattacacagtaatactatgataatctaattgcaattgacaagataaaaatgcacagtaatcatgtattgcacctgatataggcaatattacatgacctaatatcctgccttttacgtgcctatttcattccttggaagctccctggtaataaatatgctattaagcagggcttttttaatttgcatgtttcccttatagtgattcatcaataaatttttctgatttccttcataaataagtttcattattcctcattatttaaaaaaacaaccactttctcctgtcctgaaaggatgtcatatattagatgaccttcctatataaaatcacaaatgagagaagaccagacaacctgcaagaaaataagtaatcagacaatcgggcattaaatacagctgggcagacagtaggcattatggtatagtctgcaaaaaaggccagaggcagtggctcacacctgtaatcccagcactctaggaggctggggtgggtggatcacttgaggtcaggagctcaagaccaacctccccaacatggtgaaaccctgtctctactaaaaatataaaaattagccgggcatggtggcgggcgcctgtagtcccagctacttggaaggctgaggcacgagaatcgtttgagctggagaggtggaggttgcagtgagtgaagatcacacctctgcactccaacctgggcaatagagtgagacaccatcttaaaaaaaaaaaagagtctgcaaaaaaaaaattttacaaagcaaaaatcaaaagagaatttagttttactacagcatgagttaagtctcagcttttgcacaatttatccatgatttcttcattttgttgttttaagcatgcttttaagacatactggataactagtaaaaattgtatacaatttcaaatgacatttcagataagttttattgacttaatgctctgataataaaattataacaatcagtattattctgatttattgcaatttttactttcattttgtaatggacttggtgcattccagcattgaatgtaatgttgctgccatctcaaggtcactcactgaaaatgaggtggctcactccagtttagtgcactaaagcacatcagtaaccgagggctttatggatgaaaataccactttgtggtcacgtcgcagtaaatctaaacttttatttgcaatgaaacaatgggttttatacacaattttaaatgaaaacatactccagtcatgctactatggcaatgtgagtaccggatctgtgagagaaaaggcttttatatcgcagtccaggggaagaaatgtcagtgcatgaaattgaagaaccatctgtgccactggcatattgacacagcgtcatccagatacagtggtttctttagaaagagacatcgtccttgagtttatttttcgttcgtaaagcacgcttggctattttccctccctcttcaatctttcccagttggtgacctccaccaccctgacactcttccgtctggatttatcaaaactacccttaacatgaataaacagttcacggaaaaggaaatgccaatgagccgattcaaggagatacatgttttgcctaacagattgtcaaagatcaactttcgatcacactggtttggcaaggtagtgctgtaaattaaaaaagaggaatatgtggtgatagtttccaaattttaaaatgcatataccttctgaccagcaatctcatctctaaaaatgtatctgtcagatctatacatacgtgtgcacacagagatgtatgtacaaggaaatttatcacagcaaaagactggaaacaaactaaatgtccatcaacagaagagatgtaaattatggtcaatccataaaacggaacactgtacagcctttgaaatcaacaaggcagctctgtatgtaccgatatggcacaatttctgagatcatacagttaagtaaaaaaaaaaaaaaaaaaaagcaactgcaaaacattgtgtatagtgtgcttagggtgtacgtatttgcatagaatctctgtggaaaacacaatcagccactaacaatggttcttttgtaggaagaactaggggactggtaacagggtgggagagacttacaattcattataaactcattttgttttgaattgtataccgtatataagtattaactacttgaaatgtacacataaaaataagacacttccaaaactgctttggattgtaattcaaataaaaagtcaatatttacgaagaaaagactggccaggctcaatggctcacatttgtaatcccagcctgttgggaggctgtggcaggaggatcacttgaacccaagagttcaagatcaactttgttttggacaacaaagtgagacccgtctctacaaaaaaatataaaaatcagctgagctggtggtgcacacccgtagtcctagctactcaggaggctgaggcaggaggatcgcttcggcccaggaggtcgaggctgcagtgagctatgattgcaccactgtactccagcctgggtgacagagcaagatcctgtctgaaaaaaaaaaaaagaaagagagaaagaaagaaagaaaaaataaagaagggagggagggagtaggggagggagggaaagaagtcacagaggagaggacagaagtagaaggatacaagaagggcgggtgggggctgccactgggggacaggggcttgcttcccttcaccgtccttcccgcatccccccttgaccatttctctgttctaatccagcctggattcacatttctttttcatttttttttctttttttttttttttttttttttgagacagactctcaccctgtcacccaggctggagtgtagtggcacaatttcagctcactgcaacctctgcctcccaggtttcaagcaattctcttgcctcagcctcctgagtagctgggattacaggcatgtgccaccacgcccagctaatttttgtatttttagtagagatggggtttttccatgttggcctcactgaggctggtcttaaactcctgacctcaggtgacccacctgcctcaacctcccaaagtgctgggattacaagcgtgagccaccgtacctggcctgaatttgcatttcttccttaatctcctcacatcttccattctcctctcacttcccatttattctcctctgcatttccattcactctcctagtggtcaattctcatttcaatttctctggtttctcatgttctgcctgtctctgaggattctccccagccccctccatgaggaggaccagagccagcccttctgtgctcgtgccagtgtacaaccgggcttgccaggtacacactgcgtgcacccgggacgcccaaatagtgtgaacaagccgcgttgcggttaacagccccatctgtcatctgccctcttctggaactcaaagtgttcagcagagagttgtctgtgtatcttcttctctaagtccagataccacagtgatgaacaatatatctgccccttgaccagcactggccaacatgtagaagaaatgcatccaggatggggtctaaaaatctggagatatttcacgcatttggggtgggtctcagatagggacccaggaacacccagtactagctgaatgtctgtactgaatacgtcagcagaggtggtaagagaactccacacacagaggagaaaacggagctgaaggaaggaggtgagtgcctccaactgttccgcatcatgcgtttactgcatttaacttgctttccctttttcctcttttattaaagcaaatctcctgctatgtttataactcctttcaacggtacgtcaacggtgaagccaaaattctatttaacattgctcaataattcaaattccatcaaacatccatcaaaatacttttataagccgctgatatgaagcatttcgaaaaggtgcacatttcatctctccaaacccacacaggaactggttggttttcttttgatattaatttgaaatgctacagtccaaaagattaggattcctgcaccgacttagtgagtttttcaacttgatccaccttgaaaacagacacattgtttttattctatttgatggttattgcaaaagttacaagcaaaccaataaacagtttatgtcatcttaaagagatgccttggctgggcgtggtggctcacgcctgtaatcccagcactttgggaggccaaggcgggcggatcacgaggtcaggagatcgagaccatcctggctaacatggtgaaaccctgtctctactaaaaacacaaaaaattagccgggcgcggtggcgggcgcctgtattcccagctgctcgggaggctgaggcaggagaatggcgtgaacccaggaggcggagcttgcagtgagccaagatagcaccactgccctccagcctgggcgaaagagcgagactccatctcaaaaaaaaaaaagagatgccttggcagatttctggcatatggaaatccttctccatttttctcacagagaccctccaagagaaggtgaacatggtaagccctgccacaccatgttacagagattctccagaaaggaaaatggtgcagaaactgggcacttggcaggatggttgagcccaggcctctgctccgtgagctcccagctgcaccacctctctgcttttcccatccctgagacccttccagctctaaaattctacgacattacctctgagataaacaacagaagaagagcaggacagcaaaaatggagagcaatgaaaagtatggccaggcacggtggctcacacctgcaatcccagcacattgggaggtggaggcaggaggatcgcttgagcccaggagttcaagaccagcctggtcaacatagtgagctcctgtctctactagaatattttttaaataggcaggcatggtggtacctgccaacagtcccagccacctgggaggctgaggcaggaggatcacttgggcccaggagtttgagaccagcctgggcaacatagtgagatctatatctctacaaaaaaaattaaaaattagccaggcttggtggcacatgcctgtaatcccagctactcaggatgctgaggcaggaggatcacttcagcccagcagccggaagctgcaatgagatatgatcatgccactggactctagccgggacaaagcaagaccccaactctgaaaaaagagaataagagtatacaatgcatgcgggacttaaaatctagatgatgggttgataagtgcaacaaaccaccatggcacatgtatacccatgtaacaaaccagcacattctgcacacgtatcccggaacttaaagtaaaataaataaaaaataaaaaatgtttttaaaaaaggaactgtgttagaataaaagacacttgagagactgaaaaactatagaaaaaaaaaaaaagaaagaaaagcttaaatcaagcctgagtcccaatcagagacaggaaatggacttccattgtcttcccatttttttgggattttacacagacacgaattaagagagactatttttcttttgcctccagatcccttcttccaccttctgtgtaatcatctgcaatcatctcaagcatataaatagacacttttaaaagcacccccacctcaggaggtgtccaaactgggttttgaaatggcaccctggaaatccaagatctcctgaagatgcaaggcatgacataaaatgaggacgcagtgggcagatgtgatctctgagtaatggctggggcttcaggaagctgacccctgaaccaaacaagcaagcatggtggctgcagaattatggcccatgaaagagccaaagggtgggattaagagacagatggactcccggctgggtgccatggctcacgcctgtaatcccaacactttaggaggctgcggtgggaggctcccttgagctcaggagttcaagaccagcctggacaacatagtgagagaccccatctctacaaaaaaataaaaataaaaattatctgggcatggtggcacattcctatagtcctagctactctggatgctgaggcaagagaatcacttcagcccaggaattcaagactacattgagccataattgccccactgcactccagcctggacaacagagcaagaccctgttccaagctgggttttgagatgacactctagaaatccaagaaaaaatttttttttttttttttgtagagagatggactcctaaagacagtacttgggagtggagaaggaattatctacaagggaagaattaaagagaatgaatgcatggtagggcactgacctcatcaaccaaggaatctgagatgaggcctgccatgaacaacactggtgaccaccaatctgatatggggtctccctgttgactctatcccagcattgtacagaagtggattggacagaattactgcaaccaccggcgttacagggtttcgaagacttttattctgcatttaagagatttacaggaaatctccaggcagttaagctgcggggctgagcgtgcctctcagctggctggaagccaatcatttggagggtcgttctaattcctgggatatgcagtcatacagtcaggaagcagccctgaccccgctaaggtcagtgtcgtggccaactaccctgagctcaatttagagacataactatggcaacaactgtgcccaatcggttattagaggagatttattgacggatatgcttgaatagcagagccattaattgcaattaccagacaagacactttgttcatctcggggaactgaatgccaaaatgccctaacaactttaaaatcgcatttgctcttgggcgctccgctggtgtcactgcacctgcccagcttcccagtcctgagatggagaggataaggggctgagcctgacatggcaccagctggagaaatccacagtgctgggtcctgaggcacgaggcagaggaaccttccatagaccctgcaaggcccttcacagaggtgagggaagcatgagctgtcccgctccacccagcgccccttctccaggtctgttctcacactgctataaagacatacctgagactgggtcatttacaaagaaaagaggtttaattggctcatggttttgcaggttgtacaggcttctgcttctgaggaggcctcaggaaacttacaatcatggtggaagatgaaggggaagcagccatgggagcaggaggaagagagcaggctgggtgcagtggctcacgactataatcccagcactttgggaagccaaggccggcagatcacttgaggtcaggagttcaagaccagcctcgcaaaaatggcgaaaagctgcctgtactaaaaatacaaaaattagctgggcacggtggtggacacctgtaatcccagctactcgggagactgaggcaggggaatcgcttgaacccaagaggtggaggttacagtgagccaagattgtgccattgcactccagcctgggcaacagtgagactccataccaaaaaaaaggaagaaagcgaagtggaaagtgccacacactttttttttttttttttttttgagatggagtcttgctctgtcgcccaggctggagtgcaatggtgcgatctcgcctctcggcaacctgcacctcccaggttcaagcgattctcctgcctcagcctcccgagtagctgggattacagacgtgcagcaccacactcgggtaatttttgtatttttagtagagatgggggtttcaccatgttggccaggctggtctcaaactcctgacctcaggtaatccacccacctcagctcccaaagtgctagggttacaggcgtgagtcaccacgcccggcccaaagtgccacacacttttaaacaacgagacagtactggcaggggggtgctaaaccattaggtaccacccccatgatccaatcacttcccaccaggccccacctccaacactggggaatacaattgcacatgagatgtgggtggggacacagagccaaaccatatcagatctcaccaacagagcactggaatatcttctgcctttgctctgccaatccacacctgtcatttcctttgagatttccctaagtggccttgctatgtttggtggtgttcggccctggctctaatcactttgtggtcccctgagcctggaagagtcagtccctggatatcagccttctggtcttcctcagggcagcctcctctgaacaccccatttctctaaaacaggaacctccacctccctcatgtaccttccatcccttcactctgttctagtttcatccagcactgaaattacacttcgcattggtctgcctctttgcctgtttatttccgtctctttcactagattctaaggtccaggagagcagaaatttggtctattccttccaccactgtatccttggtgccaagtacagcacccgacacacagctggtactcaaaaaatacttatttttttgtttgtttgtttgtttttctctgttgtgttcttgtttttgagacagggtctcattctgtcgtccaggttagaatgcagtgacatgatcacagctcactacagcctcgaactcctggcctcatgcaatcctcccacctctgcctccaaaagtgctgggattacaggcatgagccactgtgccccttgagaaatatttgttgcatgaatgaatggactcagtacattctgaagttgtgcttacagggaccttctctatccaactagatcatggcttctgtgaaagcagggattctctccctactcatcccttcttcctcagcaccgtgcataacttagatgctttaaaatttaagcaagtgaggccaggtgcagtggctcacgcctgtaatcccagcactttgggaggccaaggcaggcggatcatgtgaagtcagaagttcgagaccagcctggccaacgtggtgaaatcctgtctctactaaaaatacaaaaaaaaaaaaaaacctagccgggtgtggtggctggcgcctgtaatcccagctacttagtggggctgaggcaggagaatctcttgaccctgtgaggcagaggttgcagtgagccgagatggtgccactgcactccagcctgggcaacagagcaagactccatctcaaaacaaacaaacaaacaacaataaaaaaaagtaagtaaatgaatgacattgtgaaccacaaacactatccacacatcagaataagaaaaagcacatgtccaccacttttctagggaaaaataagagctaacacttaaagaatgctttctcccgggagagttgtaagtgctctccaaggtattcattcataaaattcacaggacaacactaggagttgggggatagaattttctgctcgtgaaaggtgaggacttggagttacacagctagcaagtgacagtgatggaaacaggtccaggcactccagacagaatctctgcccttaacccccatactaggctttctctttcttctgactttgaaaactaggataaattcaaaaacaattagaaaaacatcccaagagaggactttgggtgctaaccctctgctctgctcccttgagtttatcttttattttttctttccaagtagattgcaagttacaaatccctgctccaaattaagatgtcacgtgataatctctcccttacaggttaaacttcaagactatgcttaacctgcggttagtgaggcacatgaaggtctttccaagagagagttgaatgcagctcttccccgagctgtaagaatgcaaccccagattaaattggcagagcgaaggcgggagcaggcagagacagcttggactctctgccaagggtgtagagtacaagaatttccagctaacaaagatgaacttctccactgatgcaaaactggccccctcaggtgtccttgtgatttacatcatttcagtgttaatatgcaggggggcctttgataaataagaccctttaagtaactggaattttctatactcaacactaatgcccactaatgttaattaagtatttattgaaatcaaaatttctggccaggcgtggtggctcatgcctgtaatcccagcactttgggaggctgaggcaggtggatcacctgagctcaggagttcaagaccagcctgggcaacatgacaaaatcctctctctactaaaaatacaaaaaaattaaccgggcgtggggatgcacacctgtggtcccagcaagggaggctgagatgggaggattgcttgagccgagggaggtggaagttgcagtgagccaagatcgcaccactgcactccagcctgggcaacagagtaagaccttatctcaaaaaaaaaaaaaaaaaaagaaaagaaaatcaagatttcctcagtggatccaacaacccacataaatataacctttgataacccatagtgtctaccatccagttctctattttacacagttaaatggagcaaagtgatattgggtagacagatctgaagtactacaagaatctactagtaccatgccagatgctgatacaacattgtggacgaccccacagaatccacagtctatagaagggagtggccattcatccccaaactacacagataaactgcaactatagcaaggggcacatggtgttaagagagggtaaagagattttaatctggtcacagaggtcaatgaaggcatccctgagaaaatagctctttcgttaagacctgaaggaagagtaagagaatgaatggggagtagggagagacagtgaggacacggagcttggtgcagctggaaaaccaaagtgtagattggtgaggatgggcaggtgtgatggggctgaggctggggcagtgcccagggacatcaggctggacctcgaagatgaaataaatgtctggatctttatgagcagccactggggacctttaggctctttcagaaagggaaagattcgaggattatgtagaaggtgaaactgacaacctgctatgcatccgttctgcacacttgctgaggcaggagactggacaaacacactaaagagagaaaaagaaaggtcaacagcaagggctgaaataaaaaggacttgctggcccatcttaaggtaaacagaaaaacactgagggcacacatctccagagtggtacagtcaggccaagttttgctactctcagctaactgcaaatgtacacttctgcaaatggcccagaaacgaatctcagagcttgataacaatgagtcaacccatcttcaaccatggagatgggttctattttgcactgctctcactaaaacaaaacaaaaatctaggcgggacgtggtagctcacatctgtaatcccagcactttgggaggccaaggcgggcagatcacctgaggttaggagttcgaggccagcctggcaaacatggtgaaaccctgtctctactaaaaatacaaaaaaaaaaaaaaatagccaggcatggtggcacgtgcccgtaatccaagatactcaggaggctgaggcaggagaattgattgaagccgggaggcggaggttgcagttagccaagatcgggccactgctctccagcctgggtgacatagtgagacttgatctcaaaaaaacaaaacaaaacaaaaaatccaaaaatctataacatagctattattcttgcgatgacaccaacattattatgcatccgtagagcaggatacttgttttaatctgcacaaaaatcacagcatgttcatgctgggaggaaacttaaacattatctgaatatttgtgtacttttccagtattctcacagatgttttcatatatagtttattttctgttaacatgtatgtttggtgtcccctaattaaactacgcgtgtttttcatgtgggctataccatgtgtactgcctttcaagttaccctcattcccatctaagcaccagtggaacacacacacacacacacacacacacacacacacacccttccccacccacacacacacgactgtactcagaggagcttaatcaacactgttagttgactgacttactgacaacagaccaaaggctgcctctgagactgatggtcaaagccatgaaggcaagagatgtatttagtctccatttaaaagaatctgattcggctgagctcagtggctcatgcctgtaatcccaacaatttgagaggccaaggagggcagatcacctgaggttaggagttcaagactggccaacattgtaaaagcctgtctccactaatataaaaatcagccgggcatggtgacaggccctgttattcccagctacttaggaggctgaagcagaagaatcacttgaacccaggaggcaaaggttgcagtgagctgagatcatgccactgcactccagcctgggcaacggagcaagattctgtctcaaaaaaaataaaaatgaaatgaaagaatctgataaaaatataagggagccaggcatggtggctcatacctgtaatcccagcactttgggagaccgagtcagaaggagtgcttgaaatcaggagtttgagaccagggtgggcaacatagcaagacccccatctctaccaaaaaaaaaaaaaattaattagccaggtgcagtagcatgcacctgtagtcctggctactctggaggctgaggtgggagggtcacttgagtccaggagttggaggctcagctaggagtcagtaggtaggatcaggccattgcattccagcctgggccacagagagagaccctgtgtcaaaaaaacaaaacaaaacaaacaaccataggggagagatgaaatgaaccgccaaagacttgctccaccggctcttcaaaggatgggaaaaaccaaaagcggctagaacctgaggccccagcccctctccgtgcaggaaagttggttctgtcactcatgggaagagtggacctggattaaacaggaaagctgagaaggatgccacatccctggttaaaaggtcagggggaaaatgagtatatcaagcaaactgagaggtgttgcaatttcagaagcaaagtaattttcttagatgacagcataagccactttcagctttttcttttctttgatccatcagcgttgccctggccaccaaccaagttcacacagtccaagcagacattctggattgcatcaacatgttagcactcttcgttttcaaaatgtagaccatatatagctaagattaaacctgtagcaaccagcccctagatgtcattgttgctgctgaaatatcaactcttgagtcttggaatttttacatctgaagagatagcagtgttcatctgaataagccccttaaataatgcaaattcaattcactttcggtttttcaaagccaagtccaaagtcttctggacttcttaaccaaaatgcaactaaatcttagggtgttagcacacattcagttgccaacaaaatccgcattcaggaaaaataggctgaaaaacccacgtagtcgtatgtgacattcctaacgtgctcacatcaaattccacgacataagctgattatggagtcgctgggcgattctgcccttcttcttttcgtgtgttgtctgacttctgtgcctgcctctgtcatcggtgtctggagctcagagccgtctgtgccttgcgaacagcagcttccaatcaagggcgcgtggaagagcagaagcgcccaccctgtttccaacaagccattgaatgcgacatattctttgttcacagtgtccttcaactccatctcttccttccatttcatatcattccagtcccagtctttgcaagaacaatactttattgtttactgattgctttctatgagtcagacacacattcggttctttaaacttttcaatggccctgtaaggtaggtatgaagtaactgaggcacagagaggtacagtaacttgcccaggacacacagctagtgagtgctaacaggttttgaagcacagggtcaatgaaaaccggtccacagactagattcttagggcctctctgtggccaactcccttgtctctaactggatgccacgtttattctctttccaagcctccggccctcaatctcacaccctatcttcccaaaagatgcttttgagtagctcctccaataaactttatgcttgggagcatgtctgctaaatgaaatcacttttttcttcgatcattcagtgtttactgaatgtagctacattttaggccctgttctaggccggaagggcaggagagatattgatgaacaaaactgacaagctcccctgggctcttgaagctcatttcccaccagggtagacacgtgttgaggcagtgattacacatggaattaatgacaagagagtgaagtccacaaagacgcaggaaatcacacaagcagagcgcccgacatgggccctccaacagaaggccctcaacagaggcctgctgcctgtctctgcctggcccagtcccagccccaatctgcctttctggccagagctcttcctgctccccatactgagtcctccaaccccagcagaggggtctccacgatccagatagatgccctgtgtccgtgtgcacctccctgctccattcaggttggtccattttcttccacgtgccaaggtgacccattcttgaacttaggtagctcagattctgctttcccattacctggtcctagggatgtccctgcaggtggcctagagatatgagtggaaggaggaggcctgatgcaagagggatggacatggcagcctgaccacctaatcatgaagcttcatgcaccccacagctccactcatgcctaattctggatgcaccacttatatctggcgacagatttctactgggccttcctgccttctggccttgtggagctgaagatgaggccagaaggggcatgcaatttgctatttgcagtgtggatgatacggtttggctctgtgtccccacccaaatctcatctcaaattgtaatccccatatgtcgggagggtcctggtgggggtgattaaatcatgtgggcggacgtctcccttgctgttctcatgatagtgagtgagttctcatgagatctggttgtttgaagtttgtggtacttccccccttactctgtctctctcctgctccaaccatggtaagatatgcttgtttcctcttgcctgatgccatgattgtaagtctccggaggcctttcagtcacgcttcctcttaagcctgcagaactgtgagtcaattaaacctcttttcttcataaattacccagtctcaggtagctctttagagcagtgtgagaacggactaatatagtgaactttctctgggtacgatatgcattttttcctttcctttatcactcatgtctctttctcagtgaaagaaacatcccaggctgggcatggtggctcacgcctgtaatcccagcactttgggaggccaagatgggtggatcacttgaggtcaggagttcaagaccagcctgggcaacatggtaaaaccccatctctactaaaaatacaaaaattagccaggcatggtgacatatgcctatattcccagctactcgggaggctgaggcaggagaatcgttggaacccaggaggcagaggttgcagtgagctgagattgcaccactgcactccagcctgggtgacagagcgagagtgtcagtgtcaaaaaataaaaattaattaattaattaattaattaaataaacatcccagaaggtcaaatactataccatgttccctctgcttggtcttccccagtatacgaagagctcaagctgggaatcttagaagatagactccttgcaatctgcagttatccatttactgatgtcttaagcaagaagtagaactcccagccagtcggtgatgatgccagcagctcctcctagtctatcacctcaaaaggagctgtcaaaataacaaatgacatatttttaagttgcaggattaccccttagctgggctttcttggtttgattagcagttacttttccttttagtgtctttcttcatcttctcctccttcttcttttcattttcttcctctgctccactcatcaataaaggccactgttttcaggaaactgcttccctaggaagaattgaacagtatactattacaatcatattgtcttgttcagaagcaggtggtattacctgtcaacaggggtttggggcagagcaaatagctcccacccagctcggtgaagccactccctggctcctgggtagagaaaaatggccaaagaagagagctctttggaggcctcaaaatctcattttcattccctttgcagagaagagactgactttattgacaaagacgactgaaaattgcttgagcgttccaataaccagtctgcgttgaggcagaaagacagtctggcggaggcaagctccctgctccaccgctagctccgccgagccacgctttcctgcagcaccagtctgtggcatatgcagactagactgaaaggagcctcctgtcggcctcaaaagcagcccccctccacctccactcccagcctgctggtgcgtttcctggatcccaatcacaaatcaacacgaatgcagggaatctctgccagacaccaaactcttaggctgattcaggagcttggggtcaggcctaagttggcttggaccaggcacaggtcccattttccactggagtgccctgtggcttggctgcacattgcgcgtgggccactagatgtcaccattattgattcttgtccttatacccaggtcctgagtctaagacagggtctcagggctaggagaactctggagagaattccatcgcagcgttgactgcagggctgctatatttgctatgtctgagttcctcggtgggccttttctaaataagttagcatctcagccccaaaacagctgagctgcaaattaagcaaagaccagtattagccagagccaaccctgattttcacaatcacgtcccctgccctttctcctcctcttcatcgtcagggttggtcattatgcatccttctggtttacttgggccctcaataagaaataaattaatatgtatgcctcatagcaccaaggattttagatgttgatgtgctgttgaagaaacataggtctgtggcttttagcagagaatgaatgacagagggataatttatgatggtccttgagacctgaactacaattatgaagtatttctaggtgtatattcaggatgcaaagtgcaaggaacccagagctaatgttaatttattactgacagctgtatatataataatatatcacgtcttttcatcttacattccttctgacttacatcaagcaatcttttcattcattaataaaatcaagtcttgccattattcttaatgatgaagtcccatcttgaacccagaggactcctatcattaaactccgtgcttctatataccagtcatctgaagctcaaaaaaaaggataaattgaacttcttgttttacaagcaaggtgaaaacatcggaaagatagagcccacttgctcacagtcccacaagggctaagtagcaaagtcagggacaatttcggggtttatttttctcagctcgcactaccacatccttttttgccttttagctctcttgcctcctctcacctttctacaatctctccttttttgaggcagtatttttttttttttttttttttttttttgagacggagtctcgctctgtcgcccaggctggagtgcagtggcgggatctcggctcactgcaagctccgcctcctgggttcacgccatgcctcagcctcccaagtagctgggactacaggcgcccgccactacgcccggctaatttttttgtatttttagtagagacggggtttcaccgttttagccgggatggtctcgatctcctgacctcgtgatccgcccgcctcggcctcccaaagtgctgggattacaggcgtgagccaccgcgcccggccgaggcagtatattttttaaaggtcatgataaaaattacaccttaaagaaatacgggccacacgtctcgtccaattttcggttctgtgccaaagacttacatgattaatcccttcaaaacaaatctaatctaatcttatcacaccaaagacaaggtgtccttcataagtattgtggctggaaacaagtaggtcttcctccagtttcaactcgttcaatgtctcattcagtttacaaccagtcatcaccttggcaacttactcgaggcactgtcttcagcgttcccaaaacgtaagtagtgctccagttcagcttgtaaaatcatcaaactccgtggtcactttaggagatacagagacccatgatacttgtagataaagcgaaacctttagcctcatcgactaattaatggcctcaaagtaaaataatgaggtgtgtggagatagggattcagttactgggtcatctctcatctggagacacaatcagattccactgaataggcgctagataactgaataagcgagtttcctatctataatactaaatcttactaggattgtttaattaaatcatgataaataacactctgtggcaggtgagaggtgctgagaagagcttaggtgagatgtccacaagttcaatggaactacatctgaatgcctttgcattcttctgacttaaaaatgttgactgtaactttccagagagttcttttctaggaaagagaaatactgaggtgctgtgtcccaggctttttgaagttgtcttggttttcctatcagattctgcattgtatactttctcagtcttcaggaatgaaggtcctaattccttcattatcattcctttctgcctataatgatttcttcctaatggctctggctgttccaggtacatcagagtagggagtgggtatcagtggctgtgtcatgctacagtaacaagcagatttctcaaagaactaacattagaactaccattccacccaacaatcccactactgggtgtatacccaaaggaagataaatcattttaccgaaaagacacctgcactcatatatttactgaagcactattcacaattgcaaagacatggaatcaactgaagtgccatcaatggtagactgcataaagaaaatgcggtacatatacagcaaggaatactatgcagccataaaaaagaacaaaatcatgtcccttgcagcaacatggatgcagctagaggtcattatcctaagcaaattaacacagaaacagaaagcccaatactgcatgttctcacttataagtgagagctaaacatggggtatacatggacataaagaagggaacaatgaacactgcagatcccaaaaagggagaggcagggaggggggcaaggtttgaaaaactacctatagggtacaatgttcactatttgggtgagggaatcaatggaagcccatacctcagcatcatctaatataccatgtaacaaatctgcacatggacctccctaatctaaaattgaaggaaaaaaaaggccaggtgcggtggttcatgcccgtaatcccagcaatttgggaggccaaggtgggtggatcatctgaggtcgggagttcgagatcagcctggctgacatggtgaaaccccatctactaaaaatacaaaaacaagccgggcgtggtgatatgtgcctgtaatcccagctactctggaggctgaggcaggagaatggcttgaacccagcaggtggaggttgcagtgtgccggaatcgcaccattgtactccacccgtggcgacagggtgagactctgtctcaaaaaaacaacaacaaaaaatcagctccaaaatcatcagagacttgctcaccctacatatccaccaccatgggtcagctggggactcagctcatcattgtccctctaagatgctggctgacgggatggccgccacctgaaacactgccagtcatcaagccaaagggaaacatactctggagggaactgcactggcaattaaatgctccagtatgaagggaatgccctcactcccacacacgatccattagccaacaccagtactggccacacccccgagccacagggtcaatggaaactaaccttatgccagaagagggacaatgggaactagctggtgaataccagtaatgaccaccacaggaacttcaaacgaagatacactttcgttcgcttgttttaaaagttctttattatccctagattatattttctctattgtgtttctgcactctcccttgatcaaataattctgtcatttcgtctgtctactttcagattcatggacattacacttaagacatgactaacgaaaagcctctcttcagataatgataagttaggattgtttgtgccaatagcccaaggcaaggaatttctcatattacttgtttgttctccctttcaacacttcgtatttctgggttttcttcactgttttttctttccacccttccatgctagtctcctgctcaatctcttaccttttatcgaaaaaaaaattactcaacattttattttttcacagctatttggtctaattggcaaaggattctgtggaatagcagaattctaactttgcagccgggcgcggtggctcacgccggtaaccccagcactttgggaggctgaggcgggcggatcatgatgtcaagagatcgagaccatcctggccaacatggtgaaaccccgtctctactaaaaatacaaaaaaattagctgggcatggtggcacgccctgtagtgccagctactcgggaggctgaggcaggagaatcacttgaacctgggaggtggaggttgcagtgagccgagattgcgcccctgcactccagcctggggagagagtgagactctgactcaaaaaaataaaataaaaataaaaataaaaattctaactttgctggtttcctaacccccaaattcagatgaatttgaattctgaaatacagtaacaggaattatcagcctgtctgattctaaattttgttggatcttcctcccaggaccgtggacagcccagccagctgtaaaggcctctaaaaagatctggaacagatccccaagaggtatctcaccaaatgagtccattccactacaatggccagaatcttcagttttacacccttgctcatgcccaccgctcacccggagtccagacccaagcaccatgctgcgtagttcctaatacggcaaaactatccagcatttttggtgaaattggctggaatgcttcacttagtccgtttttcactgttagcaggagaaccaccctagtatctttcatagaacagatccgaatgacaaacaccatcgtgccctcggagggctgagcttgtgttactgggtctggtcctacaaaccctgaaaatcctgaatctctcaagcaaagagattccccagggccagctctggcccttaacaggcaccccttaacgccaagctgcgaatctggctaggacctctatattttagccaagaacaccttgaaatgtacagtcctaccaaaggaactaatacaaatccagaagcacaaggctaaagaaaaaaaaaaaaaaaaccccaatgcccattgttgaaagccaattgcggggtgagtggggtgataaggctagcccacagcggatttaggcgacgtggggagatgccaaagtgaatacacggtgacttctaaatctagacgtctggaaggggccatgagagccagacaactgggcccgaaccccgcccgggagccagggtttgcaaggggctaaaccggctggggagcctccctctcgcgggtccagcctcggcggcccgggacgccggtaggcggggcctgagcctcgccccgcccccgctgcccgccattcgggtcacctgacccacccgcggctcacgtgatccgtccccagcgccgccattttggagctccggatgaggagggggaaaccgggggaaaagagggaaaagagccgggagagaggtgggcaaggacgagggcgagggcacggccgggtcctggctggccaaacgaggctcgcggaagcagcagccgccgcctgaccgcaggtaccgcgccccggggccgcccctccgcccgctgttagcgccgccgccggccatgtgcatcctcccctcaggcctctgccggcgctcgcttcctcctcagccggccgacccccgcccggtgctagccacaagccccaagttccgtgtcccggttctgtcttctgtgcagcaaggcctgcggagactctgggcttgccctgcagctgggggtggggggaacttgctgctccctgcatactgtcaccagcccggcccgcccgcaggcgttgcttccttctccaggcgttgcttctttctgcaaatgtgagatcgcttaggccagccgggatggacccagccacgatgttctcacagcatcttttgattaattttctaagctccctcattcccgacccatcacctcagtcctttagccagtgcgtggtgtagaaaaagctactacagaaacgcagccctggtcttctgcatttattaccatcctctggagatagaatgatgtctccagagatcacggagaccatcagggaaagttcccacctcttaagacctgggggcatcggaatgaatggtttgtgtagaaggccgggatgattaataaggtggcggccactttcccaaccccaaggcggtatttttaagtttctgcagtgggctgtaatttgctatcagtctgcatcgctcttctcaggcaattactggatttatcacctctttgagtttgcactttctccagtactcccctctcactcagagtatgggttgcattattgattaaaagaaagcctggcccttcattcctttacctcactaactcgttgaaaattaacttcaggggagccctaaagatgttttttctgccctggcagtgagctattttacttaaccgtaatcgataaggtagttgcattctaggtgaaacgaataagcatttttttatcttttagatttattccagccagtataagaaacagtggcaaagaaatgtaggaccagagtaggaaactgcgttagaagatatataggtcacaccactgtgtcatatctttttatgctgtttttctgcctattgtgcttggttgcagaatcactcgttagattgtatttttagtttagattaaaatagcaatgtgcaatttattgttccattctcattagaaaatgttgtcagtaaaaccaatagtgttgagtccagtacctaaattctgaggtaaaacaaaatacacaattattgggagaagtttccagagctattttttcctaacttctgcaaaatcctcaagtcggcttgttagataaattatttaaatttgcattacgtaatagggttgcatgaacattcctctgaatttctttttacatggaatattgagaaatttttcactgccaaaaaaaaaatcattactttgtttcaccaagaaagagaaatgttttgatactatatactttcgttcttggccacagctggattttgaagattgatccaagggactgtattaatttcaggaattgatttgaaagacactggctctgccacttaacagccatgtaaccttgggtaagtcacttaaaccacactgagtgtttccttatttataagactgtataacacccacctagcctgtcctaaagagttatgaggatcagataccactaacatgtttgatagagcctagctgtaaggagctgttactcttttcagtattgatattttgtacatttttattctcattgagaattaagatgaaaattggtgtattagagaaagcatggttttagagtgagattggcctggattcctgttcttaaaccagttaccactttgtgtctgtgagtctcaggtttctcatctgcaaaaaaaaaaaaaatacacaaaatttgaatattacacaaaatctacagaggcattactccctagacttgcacctcatgggcaaggatttcctcagtcatttttgtagtccccagcattctggttggcacattataggtgctcaataaatgacagtaaatctgaatattggttaatgttagttagaccttatgtcttcattgcagctgccaaattagaatattctctcaggctatgtgccaactaagaaactctagactatgaaactccatatacttgtgatatttatactcatttttttcttagtggtaattaataattaccttgggctcagaagattttaaatcaaataaattgtagccaatatagtgaggtaaatctataaataatgtgtaagcagtttccaggtaactttatagacagtttataattcagggacctgaaagttcatctagcttcaccctcttgttttacatctgagcaatctaaaactcacagagacagtgacttgcctaaggtcacacagctaattgagggcactttaggggagggacccttgagcttatgtcccctgccttcttttggctggagcaaaataaatttgtcatattttagaattacaataatctggaagaatggggaatttattggccattacttttatagcacaatttttttttttttcccattttggaaaaaacaaattcttgttctgaaagagaaggttcttttgtatcatattgtacttttcttcatataaacacagaaaattacagccttttctccaggcccacatgaattgttcaacttgattttactcatgatgaccatactactgtaattataaagaactaattagatacccaaataaccaaatagcaaattataaggaaataaagacaactgaaataatttggctcctaactttttgtgagaaagatattaattagaagcatttgcctgtggaatactgttgtcaaggaaagatttgagagagttggtggaaagggttatagaacttttctggtttgggatacaacttttgtttattacttatttattggtaacaatttaatatatttaatgttgttatgtctaaacattacaaacaagaaatctcctgttttgctaatgcctgtcgtcttctttcctcctggtgaactttcctattcagccatatcgatcttttcactcacccccagatagcatgcttattcttacttctaaaaatatagtcatgtcatggctgcttttctggtcactgctacccttgtgtcaacttgtatcagcagtattccaaggaagcaaatggcacgttgaaatgaggataattcaaggaaggtatatttacaaagatattagtaataaaggtgttggacttcaataagcaaaccacagcataatgcagttatctggagctagcagcattaggagagggagaggcatcagaatcagaagaagggtcttggagagcagcctacctggaaagaaatagccttctattgaggaacacagccaatccaaggtgacctagaggtagagaaccaggacgatgaatattctgatctcactctgctacctccctctgatctgtcatggttcttcattggctgacctcaaccagaaggcagaggacaggggagcctagtgatgtaatccctctgacagagagcagaatggaaaggaggatacagtgagcctagagggcaaatggatgatgtctggcatgctgcccatcctttgggaaccagtggacatcttacctctccatgaagcttttgcttaccttgctagcccaaaagagctcttcagtatctttcaggatttagtcattgactgttgccttttattttaccttgtgtaccattgcgttgtttaaatgctgttactttttaacttccaaatgtttgccttatccactcaactcagttttaaactgcaagtattaagaatttaaaatttttcctgatactttgccttgcgccttgcacataacaatttgtttgttacacacacacacatatttgtatttctgcattagtggtctaaataaaatttctgtgattttaaggaatcaagaaagttgaaggattggccttaaggtaacttcccctctgtgtatactttattatgatctgtttagcctttttattatgaaaaatgttaaacatttacataagtagaaagaacagtgaattcctaggtactcatcatgcaacttcaattacagaattagtcattctttctttattctcatcctatccaccccaccactgcagtatcaccaaggtaattgttttaaagctgtgcttacactgatctcttggaggccaaggagagtatgcagattgtcatagtttatgttgtcatcactattgagccactgacattgtatgtatactccttatttcatctcttttgttcagatttgcttcacttgacacacaatctcatatatatgtatttctgcattagtggtctaagtaacatttttgtgaaaattgaaagagttggccttacagtaacttcccctctgtgtatactttattatcagctgtttatctaaccttttttttttttttttaacagagacttgtttttatgagattaacctgtgcattgattttgcatggggacccaaactggtttttcaggtgtttcctgacgtatttcatgttgtcatatctgttttatagctgccattactgtacttatccccaaatgtatgcagcctttaaaatgagatacttacataaatgttcagggaaaattggagcatctgctgcaaatttccattagctcttaatgcctgagccgacacagctttaaaaatctgaatgttttgtcagattcttttgtattagtctttttcttgagttaagatgaactcctccttctcttcatttcactttctttttaaggtacacactgaaatatccacagggagcaatttgcactggtctgtgtcacttctcttattaagtagaagaaagataacatgagtcacctttgtaaccctacgggtgtgcaaagtctcttgagcaaacattcacttgttaacctccagatgatcagtcagcctacatgggtgttacatttcatggggaaggagaccttagatctacagcagagagccgtatcgtgttcaggaggattcctattattaaacttattatttaatcaatttgcatttaaccattgaactgacagacataaggccttaagttaatcaccttaaagggaaatcagtagtcacatgaagagccacagctcctcttggcctaaaaatgtggaattctaagacaataaagtgacttaggaagtcacaaaagggtttttctaaggaaacaaattgttcccccattggtctcctctttaatgacttacagctgagcgtagagatctaaaaagacttttgttccttctacctgagaaagatgaaacagaactagtcttttgagagattgtttaagggagagtggctgaaggaccacgggcctttgggagccagggtagctgtcattgttggaatggccatggaatgcatgtgagggcagttagagacagctagtagccaagagaaaaaaagctgatgccatagggcagagtattattaggaagaagggaagaaatagtactgaagaagccaagagtaaagtgtttgcatttttgcctgatgtggacctagatctagaaagctggcttgccagaaggagtagaaaatcaggaagaaaagccatagctgctgcccagagttgtgggcgacctggcactgaagctggtcagctgtgtgtgtgtgtgtgtgtgtgtgtgtgtgtgtgtgtgtgtgtgtgtgtgtggcgtgggggggcggggcctgtttttgtgtttgtgtatatgtgtgtgtgtgtggcgtgggggcgggcggggcctggcaggacattaggtatcatcttggcaggggctgaagggcccttatatgttgattcaaccatgcggggaagaacagccatgattcaccacctaaaataagaattcagagcctgggactgaagtttaagaatagtgtggtctttggtctatagctagtgccactaaaaattttgttggcatttattgaatgttgtgagtaagattccagaatgcacctaaaatgtggaaaaacaaaacttgttgctggaaaaaagcctaaacttaaaaatgtgatccaagtcaacaaattaatctcactttaagccaaaggaaatgtttgaaatgaaagtactgccaggaaatagaaagagtattctagacttaggcagaaagatttatgggtattttatgtttagtgacttcctcagccataatgcattattagaacgaacaaataacctcttctaaggactctgttcatatctggaactgaaacacaactgggatatcaattttttccttctctgatgtcccttaccctttcagggaaaaaaaaaaaaaccatatatgtggatatgagtaatagttgaccactaatatgacctctaaaaaaaaaccacagcatagtttgtggtttatcttcaggaagataaaggaagtaaaagtaggaactagattattgcttttatttaatttcatttatatagtactttcccaaattcaatatgccctgtacaaactacatgactatagtttcacaatttcaaagatttggggagaaaaaaaacaaatttgtgattttagtaataaaactgcagctatatttggtataagaaatactctcaagaattgtatcagtcattggctttacagagtgatgtttcacagtaactggaggggtttcacatgccttgagaatggctgtgctcctttaatcaaggaataggagtctttttttttttttcttggcattgtgcaaaagggagggagtacttttggtcctgctggatgctgaaggcaaagaaagtgaagaaaaatggagaaaaagatcatcatttccgaagaaataagtgatagaggggagtatcttcatcattagtcttgatagaagattgcattgtaaagagaaattctaaccaatttaaatctatactggggatcgccgggtgtgtggacatggagcttccagcttagaaaatacttagatgagattacagacactaacattctcttatattttccaaattacatgcctgtaattatcctgtaacctggtatttttctgttttacattatcctttttagatatggaagaaagtagcagtgttgccatgttggtgccagatattggggaacaggaagctatactgactgctgaaagtatcatcagtccttcattggaaattgatgaacaaagaaaaactaaaccagatccattaatccatgttatccagaagttaagcaagatagtggaaaatgaaaagtcacaaaaatgtcttttaattgggaagaaacgcccacgttcaagtgctgcaacacactctcttgaaacccaagaactttgtgagattccggctaaagtaatccagtcacctgctgctgatactagaagggctgagatgtcacaaacaaattttacccctgacactcttgcccagaatgaagggaaggctatgtcttatcagtgtagcctttgtaagtttctatcatcatccttttccgtgttaaaagatcatattaagcaacatggtcagcaaaatgaagtgatactgatgtgctcagagtgccatattacatctagaagccaggaggaacttgaagcccacgtggtgaatgaccatgacaatgatgccaatatccacacccaatccaaagcccaacagtgcgtaagcccctccagctctttgtgtcggaaaaccacagaaagaaatgaaaccattccagatatcccagtaagtgtggacaatctacagactcatactgtccaaactgcatctgtggcagaaatgggtaggaggaaatggtatgcatacgaacagtacggcatgtatcgatgcttgttttgtagttatacttgtggccagcagagaatgttgaaaacacacgcttggaaacatgctggggaggttgattgctcctatccaatctttgaaaatgaaaatgaacccctaggcctgctggattcttcagcagctgctgcgcctggtggggtcgatgcagtcgtcattgctattggagagagtgaactgagtatccacaatgggccatcagtgcaagtgcagatttgcagctcagaacagttatcatcttcatctcctttagaacagagtgcagaaagaggagtacacctaagtcagtcagttaccctggaccccaatgaggaagaaatgctagaagtgatttctgatgcagaggagaatctgattcctgatagcctgcttacatcagcacagaaaatcatcagcagcagccccaataaaaaagggcatgttaacgtgatagtggagcgattgccaagtgctgaagaaaccctttcacagaagcgcttcctcatgaacactgaaatggaagaagggaaggacctgagcctgacagaagctcagattgggcgcgaaggaatggatgatgtttatcgtgctgataaatgtactgttgatattgggggattgatcataggctggagcagttcagagaaaaaagacgagttaatgaataaaggcctggctactgatgagaatgccccaccaggccggagaaggacaaattctgagtctcttcgattacactcattagctgcagaagcccttgtcacaatgcctataagagctgcagagttgacaagagccaacctggggcactatggagatataaaccttttagatccagatactagtcaaaggcaagtagatagtacattggcagcgtactcaaaaatgatgtcgccacttaaaaactcttcagatggattaactagtcttaaccaaagcaactccaccttggtagcactcccagagggtaggcaggaattgtcagatgggcaggttaagacaggcatcagcatgtccttactcaccgtcattgaaaaattgagagaaaggacagaccaaaacgcttcagacgatgacattttgaaagagttgcaggacaacgcccagtgccaacccaacagcgatacaagtttgtccggaaacaatgtggtggaatacatcccgaatgctgaacgaccctaccgttgccgcctgtgtcactacacaagtggcaacaagggctacatcaagcagcacttacgagtccatcgacagagacagccttatcagtgtcctatctgcgagcacatagcggacaacagcaaagatttggagagtcacatgatccaccactgtaagacaagaatataccagtgcaagcagtgtgaagaatccttccattataaggtaagcattggttcaggaagtctttcagaggaccttcgcatcttagagtgagaagggaactttgtagatctaatccaatcacctcattttatagataaggaaactgggtcccagaaaagtttgataagttgcccaaggggatcccaacttaccagtattaaagttgggactgttcagaatttctgctgtagaatccttttccctgcctgctgcctccttgacagcctctgtgttttagtgtgtatagtttaaagtgttgattttctgttgcaagagaattgtagggagtgtatagtggattgacatacgtttgacttaacgtattgacatacgtttgacttaaacaaatttaaccgtacatcatcacaacaaaaaaatacatatttttcatcttatatggccccagaatgccaggcattcagttcagcttctacataaccaacagtgatgtgtatcattgcagaaggaaaaatgggctatggcggacctattaaaaggtactgtcatggaaatagagccatgtgtgtcatgttttatgggcagggtaaagaactttcaagagttattttgactgtctgatttttatcttaagtgctgaccttatcaaaaccaatatcctgtatgaagtgctattcttttataaaggaaacgttgaatcattggtttagaacttttcttcagtgggccaggtgactccttgaaaatgtattacaaatgttatcctaagggctaactaggaggtagactttttccctcagattaccgagagctggggtctagctgtggtaaaaaggtcacaggagggaggccgaggcgggcagatcatgaggtcaggagattgagaccatcctggctaacactgtgaaaccctgtctgctaaaaatacaaaaacttagctgggtatggtggtgggcacctgtagtcccagctactcgggaggctaaggaaggagaatggcctgaacctgggaggcggagcttgcagtgagccaagatcatgccgctgcactccagcctgggcaacagagcgagactccatctcaaaaaaaaaggtaacaggaataagaaagcccttgagtctgaggttcactgcttctcagattacactcatgaaattccaagtaggatgtccacataggctgcaaagacaagttcctgaagtctccaggagtttcttttgctactgagctcttgattcatgggaatggaagtagaggagacaggatgtccttggaggagcacttccagttagatctcttacacatttagatatttcaatgaaaaattaggagtctggtgattactgattggatttttttttgtgaagttgcattattctgaacactctgctcgttcctcctctgggcctaccagtgtttcagtaaatacggacacgccctgtgtaatcacctaagaaaatggtgacttcctttcagagaatatgaagaggaactgtccgttgaatgtgattatgatttgctaatgtacttctttctataaattgtcaaatgtgtcaaatgatcctttagcagacttgattttaaaatatggtaattcgttgtactaggccatgaaagcaatgaacctgttcttctacagcctcctaagagttggacatgtatatttattgaaaattacatatttctttccactttttagagtcaattgaggaaccatgagagagaacagcacagtcttccagataccttgtcaatagcaacttctaatgagccaagaatttccagtgatacagctgatggaaaatgtgtccaggaaggtatctatgtattttgttatgcaggctgcagtgacttgcacatgacataaaagtgcccttagttgtcatggttggttattttcagggcaaaagcctatattctcctccatttttgtaccatggatgtgagtgaatctgatctctgtttctgaggaaatgccaagtactgaatgaagcagatgattactaggtcctaggtgagaagccctagatagtaaggattcatcttcagttgaaacttaagagccccttagaaggtgatgtaccagcaagccagaaaagcaagccagaaaagctacaacatggaaaacaggcctcccctccctctctcggcaccagttgacctactgagaacagagcttttgcagatggtaggcccccaccccaaactttaactggggctccccgctgtgatcttattcttacccaagtatgactgccagatttcatctgcattattaaaaaaaaaaaagcacacacacagacacacaagatctttttatgtactagttaagtagcagtcaaccgagtttctggtaataagaatattagaatcaaaagatttaattagagctccatgaaaaggcggatgccacatccggagaattaaggataaagtgtactaagctgtgccgctttggttcagctcacttaaattgatatactttaaatgtctccagtgtggcacataatgtttatgggagataagacatattggggtgactttcccttttagatttgctaagaattaaagttagaaacgactacagagtgaaatgttttaccataatgtttcattaaattataccccagaaagcataactgattctagaatgcttctgaaagaactgattttgacaccactgtagcaccaaaattctcatgtcaaacagatgtcatccctgtaaaactctctgaaacaaaaggagtttatgatatagcatctgtttttgcagtagatggctgagctaaaacagttttgtttcctttttacaaaatagccctaaatgcctccttttattttaattcattatgtttccatatcccctttaaaggagacattaaaacgtctgatatgattggaccataaatccctaatgaaaggatgaagtaaatactactcagtagcaccacctgcagttaatatcagtgttggaagatgtcttttttagcaccgtcctaaaaagcaaacatttcaaactgtccaaatgagttaacattaaaattcacaattttaataaaaagattaaagtgtcagctcaaaattaaaataaccacttcagactttacagtattaatgaatgtttactagattttatgttgcagcatcttttctttgtggctcatgctttttttttagggttacatgcatggatttttaaattgcctgccatgcctcttttcctccacctggctccatttgcttttttctctcagtactgtagcagttcaaatggctgcatacttatacctggatgggtactttattaactcaatattagatattttgaaatctggttgtcaggccaaagaaaaaatttttagctcacaaataaggtaataataattcatgctttgttaaaacttctttacctatttagtaaacttgttaaacaagaagagagatttgtgcctctgtgatcctcagtctctgccattcagatagcacagataccttagggcatgtttcagcttaacatttgcttggccaaaaggcatggcctgcctgtcttgagctagatactgtgttaggtgctgggagtacagtgaaaggcatcactgcccttcaggaatccaactcagtgaagaagacagaacgaggctgatgggtatgtcagcagataccgcaggagctcaaatagagccgcaagcaaagccctttcgtatggtgttactccatgaaacctaattaaattgttttttattggaaacctataatttgccaagcgctggggattcagtctaaacaaaacaagcagatccttatcctcagggaatagacagcttagtggcagggcagagattttacccagacatgcaggtaaagtacagactttgctaaaggaaaaatataggacttactaaactatgctgtgaggttctagcatttccaatttgtagatgagaaaactgagacttcaagaggcaaaataatttacccatgatcatactggtagaaagtggcagagcgaggactaagcccaagtttttgaactttaaatccaatattctttccattggaaacagttgcttgaagtagcacaggctctcattctgtgctatattaagtttttccatctgtcagttttattagttgtcattgatctgtaatatttctcacacaaaaccattatccaatatttcacacttcattttttagggtttttttaaaactgtatttggaacagtgccatttataatcaagtccaagtttttaacctaccaattaagagcaatacttagattataattatgattagtgtgtatattaacgttatagatttataccaggaaattaggacattttgttctgcttggcagtagttattagcaaaagaaaatttcaattttagaaaccgtaaatttaacttaaggattttctttgttgaaatttcagtgtgggttttcctttgtataataccacggattttacttttatgcggtgtatacaggtgttctacctaagctttcttcctgccaagagacacacagttcttcctgctctgcctttttcatgagcttccatgcttgctttgtttctgaatataaagcagagtgtgaatagcctgtggactgtatgctgacagacaagtacatgaagcgttgaatatcttcaagaaatcgttttatatgatcaagtcactcaactcgtgttgacataagcttaccccaacttgaattactcagccctgttgttgcagagtgagtttagtaacatggctacttttcgttggatccatgtctcctgcgtttcggagagctgcatattcatgtcagtcataacctttgtccctgtaacctgtcagttaactagaaagaattatacattgcatagcacttaaaaatttgcggccgcttttcctttcttgttgcgttggtagctgacgtttagtggtaaacaaagaaaatgcactgggtgaaaaggccttaggctttttttttgtagggtgagagtgggggagagatctcttgctctgttgcccaggctggtctccagctcctggcctccggcagtcctcccacctcagcctcccagagtactaggattatgggcatgagccaccacacctagccaggctttttatattgagttggttatatatgcttcatagccacactttataatattggagtatagtattaaattacagcttgttgtcaagtcagtgtttctgtaagacagtatatccaatattggttagagtaacacctatttggtgatacagatcaacagggtgtctctgattaatttagctcctacatagccagaagcaagttcattatgacttagaatattgtacatggttatgcaggaatcatcccaacctatctgtgtttataggtcagatgatgttcagtttatatctgctgatagtgtatatgcaggaaaacctataaaaccacttcagacttgttaaaacagtgagaaagccgtgattgaaatattaatacaactgtgtggtataaattttcatttacaatggaatgtaaatgctgtcatttgaatcttgtcaaagcctgctactaaaactctgaaataccttgtctagggaataagtcttcagtccagaaacaatatagatgtgatgtgtgtgattatacaagtacaacatatgttggtgtcagaaaccacaggcgaatccataactctgataagccgtacaggtaagtgttatgattctagaattttaatgtttgtattaaaatattttatattaaagaaataaaatgaaataaaaatgtatagcacttactgaaacacaggttaagaagtaagaaattttcactaattggttttatattttgttgttttatatatttacttatttattttttgagtcagtgtcttgctgtattgcccaggctggagtgcagtggtatgatcacagctcactgcagcctcgaactcctggcctcaagggatcctcccacatcagcctcccaaagtgctgggattgcaggcgtgagccactgcacctggctggtattatgtcttgtttgatttgttaagatgtgaactttaagcttgaatcttaggacagtaggcattttgtctagttgatacataggaaattgtctttatctgtcaattttatgttttcatttcatatgggtataaatttcatagcaattttcaatgccttagagttcatttcagtaatttggcagtaaggtactcagtattcagcaaaagatccttaaaacttaaaggcaataaaattttctatgaaagagtccatttttcaaaattaagctagtatgtgtagaataagtcatttaatttcattacttgatttttcccaaaagcaaattcagatatatatttcagaaaatataggcattctcagtgatagtgctaggcaatgcgcatgaactttcacccccttgtcaaaacttagcaggtttaactctctccccagattctgtagatatgatacaagtgagtgtgggaaagttattgtattaatctcaatgaaaacctgacagattgtgccataaaaggtcattgtttaatcccaaagtgtggtgatctgtgtatggtttcgaatatttaatatgtgcttaatttgcaaaccagcagacttacttataatcactcttcagaaagtacatctgtttgcagagtcttaaaactctgtggaaggtgtttgaccttgcctcagtcctcctcagtgtcttccttccttccttctttccttccttccttcttttcttccttccttcctttccttccttcctttccttcctttccttccttcctttcctttcttcctttccttcctttcctttccttcctttccttttcttccctccctccctctctccctccctccttccttcctttccttccttcgtttccttccttcctttcctttcttcctttcctttcttcctttccttccttcctttccttcctttcctttccctcccctccctccctccctccctccttccttccttccttccttcctttttttctttgacagagtctcgctctgtcatcacccaggctggagtgcagtggagtgatctcacctcacggcaacctccgcctcccgggttcaagtgattctcatgcctcagcctcccaagtagctgggaccacaggcatgtgccatgattagctaattagagacggggtttcgccaggtcttgaactcctggcctcaagtgtccgcccaccttggcctcccaaagtgctgggattacatggttacaccatgtccaatcagtctatttaataggtgggactgagtatatttacattcgtgatttatactgggaaatgtttaggagaatgtgatggaaacagggaacactagtttacctgataggaggagaaagctttgcctttatatttttggtatccttgaatttagacataccgtgccagattcatgtgatttaagtaagaagaaaataacatttctccgggtccagaattagattgttctttcattcatggagaaatatttattgagcaaatattatgcttcaggggccgtgctagattcttggactacagtcataacaaaacagacgtcatctttgctgtcatggaacttgtagacaaacaataagcaagtaaaccctcaaatacttaggaaaaaggttagcgattctagttctgttgaaggttttacatctgctttattagatcagtcttgcagcttaaagattcattttgatagctgtcagtgtctcagggatgttttcttgtgttcttaaaatattcacagattcataggattcattgcagttgtcctagggtcttcctaccaacgggcaacatcccgtgagcatcctctttgtgtaacatcagagaactctcagtctgttattttccaaatttattcacactccactttgtcactgggtttggtgtggttatgccttagatacagttttgtcatatctccctctttgtacttattatcagtttttcctcataagtcttattttctaatgtcatggctctccttttaactttctttaaatactcaccatcctttgccttcatgggatttctggtcgcagagcattacggattaacatgttctattccaggatgtttctaggactttctcctcgttgtcctatactgtgtgctttaagcggagctggtagcgtagcctttataatgtctgacttaattcaaggatcacaggagtttctctggctcatttcatgtctgcttcattcagtttcgttgcctggtgcacttatggtcagagtttgggcttggtttctcagagttcatgccatatcctatgcatttctgattccctacattttgttaagaaacatgctcacaggcagcagtaatgagttcttaaagagctacaaggccttgttgcacaacttctaaactttgcacaagggcacaaaagatttattgtttattttagtgtgcctattacataacaagttttctgtagtggtgaaacctgttcctttctcgtgcttttgctttttatgctgtcattccagtccttcaatgaccccatccttgtggtctgggcagtacggcttcatggatccctggttctgggggcagatagtcctgggattgaatctgagctctcccacttgtgagatttgtgatcttgcgcaaactgtttcacctctctgtgctgcttttgtcgttaatagaatgaggatattaaggttgtgagggtgaaataaaatacctaaggtaccagcacataataaacagccagtaagtggtagctggtagttactgggcccagcttttatcttctcaataattcattatctaaccaaagaaaagtactaaaaggctgatgacctctaaacactagggaaacaaagaagaattaattctgtgccagggtaggcaggcagagctcattttacaaaagagatgctgggcccaggcagagtgctgtccctgctgaggtccccatgctatgtctggctgctctggagtcactctagtatcttgggagcatcacaggcctggaccacacagtttctgtgccccactggggaccttgggaatgttatgccatactaagcctcttttcccatacgaaactcgggagaatacttccccgctcataaggctttgtgaagattaggtgagattatatttatgaagtacccagcatgttacttggtgcattgaaggggcttgttcccattttctgctcatgaagttgtcagattatctcagaagccctgttcttacccagaaaaaaagagagctgttttccattcctgtggaaggacagggaaagattaaaatgacatcattctatcccagtgcctaccaatgcagctattaataactttgttcttactctgtgtaaaccatacaccaattatagttatacctgacatttctttttttttcttttttaaattttatttttccataagttgttgaggtacaggtggtgtttggttacatgagtaagttcttcagtggtaatttgtgagaacctggtgcatccatcacccgagcagtatacacagcaccatatttgttgtcttttatccctcgccctcctcccactctttccccccaagtccccaaagccattttatcattcttatgcctttgcgtcctcatagcttagctcccacgtatcagtgagaacatacgatgtttggttttccattcctgagttacttcacttagaataatagtctctaatctcatccaggtcactgcaaatgctgttaattcattcctttttatggctgagtagtattcaatcatatatatatatctccgagttctttatccactcgttgattgatgggcatttgggttggttccacgattttgctattgtgaattgtgctgctataaacttgcgcgtgcaagcatctttttccaataatgacttcttttcctgggattgctggatcaaatggtagttctacttttagttctttaaggaatctctacactgttccatagtggctgtactagtttgcattcccaccaaccgtgtagaagtgttccttatcgccacatccacaccaacatctactgtttattgattctttgattatggccattcttacaggagtaaggtggtatcacactgtggttttgatttgcatttccctgatcattagtgatgttgcatttgatttgcatttccctgatcgttaatgattttttcatatgtttgttggccatttgcgtatcttcttttgagaattgtctatttatgtccttagcccactttttgatgggattgattgtttttttcctactgatttgtttgagttcattgtagattctggatattagtcctttgtcagatgtatagattgtgaagattttcacccactctgggttgtctgtgtactctgctgactgttccttttgctttgccaaagctctttaattagatacagctatttatctttgtttttattgcaattgcttttggggttttggtcatgaaatccttgcctacgccagtgtctagaagggtttttccaatgttatcttctagaatttttgtagtttcaggtcttaggtttaagtccttaatccatcttgagttgatttttgtataaggtgagagattatacctgacatttataacattggccccaaagttttactgaaaagttccactcaaaatttttcatattagatggtccttggtttagttcaatattgcactgctggacctgccctgatttacatctcccagtaccacttttgtagagaacaagatgggagaacaaaacattgtcctaagagtatcagtttctttttaaccataaggcatggaacccattttcccttagaaatacaactgtactgtgcttaggttctgaaactgtactgtggcagggggacagcatgatgtcaagggaagtacatgggctttgggctcaagtactccacacactgcccgggacatagtaggtgctcggtaaatgttgactgatagttgtccatatccctcagttcttcccatctataaaatgggtctgattctataagctttttgtgtaagtttaatttgtgcttgaaaataaatgtgtagtggtattattacgccttttcttccttaagtagaatagctgcccaaataatataagatgaattttttttaatacccagtccaaaaatacccattttcccctaattgtttcaaaacatacttttggaggtagctttttcatattgagaaccaaacaaggtccagccgctctattaagagagtatcttaagtctctctctccctccctccctctaaattttttaaatagattttataattgatgttaccatgcctcctgaaaattgcataaatcataaaggtacagctgatgaataatcacaaattaaactcatgcttgtaacacaaaccattatgagctcttcagcagcaccccttcgtgggccttccagtcattacccacccctcccctctgtctggtatccactatcttgacttctaacattatcaattagtgttttctgtttctgaacttaataaaaatggaatcatacagtacatattctactttatgttcagatttttttgctcaacgtgtgtgtatgtgtgtgtctgtatagttccacctagcagaattgcatttcattgttacatagtattccactgttaagaccaccgcaatttattcattgttctgtgaatagacatttgagttattgtaaggttttcctccctgatatgatctgataccattttaacattcttttacatgtttttgggcacatatatgaaatgagtccatttccattgggtttatacctaggggtggaatttcttggtaattggacatgtatatgtattcagctttggtagacagtgtcaacagttttccaaaatggttgtacctattcacatcctcaccagcactttgtgttgtcagtctttaatctttattgttttggtagatgtatagcagtgtattactgtgcttttgtttgcatttccctgataatttctgagtttgagcatcttttcatttgtttatgggctattattgcccacttcttttttgcattgtctattgtattagtttggcattgttataagggaatacctgaggctgggtaatttataaagaagaggtttatttggcttatggttctgcaggctgtcctctgcttctggtgagggtctcaggaggcttccagtcatgacagaggtgaagcgggagcagatatgtcacattgtgagacatggagcaagagagaggggaggaggtacaggctcttcttaacagtcagatcttgcagtaacagacagagaactcattattcatgaatggctacaccaagccattcgtaagggatccatccccatgacccagtcgcctctgcccaggctttacctccaacattggggatcaaatttcgacatgagatttgaaaggacaaatatccaaactgtatcatcggctgttttcttactgatttgcaggagctcttcatgtattctgagtacaaggcctttgtggggcgtattgcagatgtcatctaactgtggcttgcctttctactttcttaatgatgtcttttgatgaacagacatttccagtttaatatagtcaaatgtattaatctttttctttgtgtttaggacttttgtgttcttatattctgaaactagttttgattttttgaaatagtctgttgagtaaggtagacgatgatacagaaataaaaatgtgtgctgattttcagggatggcacatcaactatgcgtgcttaggtattactgagcctcatttactaatatggcactaaagctaaaaaaatctaaacagaaaacattccagaaaggctttcagcagggggaatgacagtttggaatggaaatgataaggttgtctctcagtgtagtcagttattgtatgggatttgtataaatagaagtatattagaaatgatgataatagctgatatttttgagaagattgtttgtgggccagacccggtgtgctaagcattcaatacgtgtcagttcagtcctcacagcagcccagtacttaggaatattactaccccaattttgtagacatggaaacagaggctgggctagcttaaataactttccccatgtctcagagccggggcctgaactcttgctcctaataactgtgtcatcctgcctgtctgtgctacaccagggagatctctttatgaagtgtactgctgctgcatgccagcagcccacaccaaatcagggtgtgaaacagaagcaatttcattatgctcagggattctgtgggtcggtcaggaatttggaaaggacgcagtagagatggcttgtcccatacagtctggggtctcatcagggaaggcttgaaggctggaagtgacccagacagctagggtgacagtcctctgaatgctgcctcagcataggctggtggctgtgctggctgttggttgggcatcagctggaacacatacatgatttctccttgtggactttgcaggtctgctagtccccaaaatgagcttcttagataagaagtaggcaaaagctctgttgccttttatgacctaaccttggcagtcacagcccatcacttccaccagagttacaggcttcagtcttttttcatctgtaggcatcgtgattctttagtcaatgtgttggcttagggaaaaacttaagtctttagaaagcttcaatttgtttaaggaaaatagtgaaggagatagttttatcaggaggaaaaaatatatattttgttttgaagagatgaactgaaagagtttgtttttctcagtggcataaagatctctcaggttcatcacaaaatttgaagtggctgttttgtgggggccttagttatttctttaaaagcatagaaaatgaattgaaggtcataagataagctctattgcaaaatttctattgaaatcgttgtttatgtgttcaaaccagactcaggtcaccccaaatcttgtaggacatccatctgcttttttccatctaagccctcaaggcagttgacctggaaactaaccttggtcccaggccaggaaagtggggggttttaaaccaacatccttatctccttggggttctgagaccgaagtaactgacttagtaacagttggagagtctgtagaaaaattcagtctcaggctttttagccaagttataagaagccttgggtttctacattggctttctttgggttgccaaagtagcttctttgcattgggaagaaatcattttttatacagatacaggttgggtgttattggttaacatagaaattgtgctgctttggacattccaaagcctggatctagcaatggccatatttacaggccactctaggagtccagcaatcacactgttagggtgttcacttctttccccatgtcatgtgtatgactttgccttggtagacttgaataattgagtcccaaatggctctgtcatcaggagcatccagcaattccaccaaggaagcaaagcagaatcgtgacaggtggtgtcatgatcagtgtgctcttttgtcatgtggtttcgttttggtttaagactttttttggccaatggatgggttgggataggaaggagcagtttaccctacgtggaaatatgattgttgctggtctgttggtgaggtggttagaaatgatttgttagacatagcctctgtttcaaaacatactttcttttttttttgttttgttttttaatacatgttattgtatatattggaggttaacaatatgatgtataagatgtagatagtaaaatggttactatagtgaagcaaatcagcatatctatcatcttacgtacttttttgtggcaaaagcagttaaaatctacttatttaacaaaaattcctaatacagcacattttgattacagtcctcatgctgtgtattaggtctctagacaagttcatcctatatacctgctgctttgtatgccggaatcttctctccctccccacccccagcccctggtaaccactccttccttctctgtgtgtgtgtgtattggatttttaagtaagattgaacaatatttgtctttctgtgtctggcttgttagcatgaggcctccagggccatccatgttgtggcaaaaggcaggctctccctttttaaggcggaatgattgagtatgtgtgtgtgcgtgcatacgtgtgtgcgcacgcgcgtgcacgtcacgttttctttatccgtttgtccgtcagtggacacttaggttgtttccataccttggtttttgtgaggaatgctgcactgaacatggaaaggcagatacctggtgaggtggcgatctcatctcctacacagaagagggatttctgggtcgtgtggtagttctgtttttaatttctttaggaacctccatactatttttcatggccgtaccaatctacattgtcaccaacagtgtagtaggatttccttttccctacacctttgccaacatttattctctcttttgtctttgataatagtcatcctaacaggttatcatttcctagtggttttaatttgtgtttccctgatgattagtgatgttgagcacgttttcatatcactgttgcagtttttatgtctttggagaaatatctgttcaggtcctttgcccattttttaatcgagttatttgtccttctgctattgagttataagtgttctttataaattttggatattaaccccttatcggatatgtggtttgcagatattttttttgcagtctttaggttactctttcattttgttgattgttttctttgctgtgcagaagttttttggtttgatgttgtcccatttatttatttgtgcttttgtagcctgagcttttggtatcataaccaaaaaatcattgccactgcagcgagatttttccttgtattctcttctaggaatttgatggtttctgatattccattcagctattttacccattttgagttgattgctgtggatgatgtaagatatgggtccagtttaatccttttgcatgtggatatccagtattcccagcaccatttattgaagagactgttctttctccattatgtcctcttggtgcccttgtcaaatattcattgactgtgtatttttagatttatttctgggccatttattctgttccatggatctgcacttctgtttttatgcccttaccatactgtcaaaacatattttctatcatttctcctttttctgggtactacatgtacagatcagagccttaaaaatggctgtgcccagccgggcgcggtggctcacgcttgtaatcccagcactttgggaggctgaggcgggtggatcacctgaggccgatagttcgagaccaggctgaccaacatggagaaatcctgtctctactaaaaatacaaaattagccaggtatggtagtgcattcctgtaatcccagctacttgggaggctgaggcaggagaatcacctgaacctgggagggggaggttgcagtcagccaagatcaattgcaccattgcactccagcctgggcaacaaaagcgaaactcccatctcaaaaaaaaaaaaaaaatgactgtgcccgtcagcccaggaacgttcttatctctggaaaggaaggggaggcaattgaggtgaggcacacagggagtctcaaaggtatattggtaatgttctgtgtctcaactaggagtgttaattgtttattattattattattattttttttttttttgagatggagtctcgctctgtcgcccaggctggagtgcagtggcgtgatttcggctcactgcaagctctgcctcccaggttcacgccattctcctgcctcagcctcccaagtagctgggattacaggcgcccgctaccatacctggctaattttttatatttttagtagagacggggtttcaccgtgttagccaggatggtctcaatctcctgacctcgtgaaccgcctgcctcggcctcacaaagtgctgggattacaggcatgagccaccacgcccagtccattctttattattcttaaggagtcttgcgggggaaatgaactctatcctaaaaaataatctgcagtgcatttatattgatgtgcaagataatttgttatagcattgtttataatgtcaaaaagatcaaaaacattctagctctatgctacttagtagagtgtattttcataggatggaacattataccccattgaaaatgcataatttttaacttgagaaaatactcatggaacattgtcaaaagtaggattaaaaatctatagtatgattctacttttgcttcagatctacatatgtacattaaaaaagaccaggaagctatgcaagtaattttttagaatttgtctttatacttgcctatattccatttttgtgcaaggaatatagattatataatcagaaaagggtttaaataaagagagagcgtttgctgaccagttgagtggacaggaattggctcagtaatttaaactaacaatccataagcaaggggctctgatagcatggcaaaccagatcacccacaacgctccacatgaagaaaaggcgtttttttcagctgtcagttctgcaggccgaaaagtttgagggcctggccctggcttctggtgaaggtttttgtgctatgtcacaacatggcagagaaggtcaaaaaaggggggacacatgcgaagaacggaagaactgaggggcgtcctggcttcataacaccccactctcaagagaactaactcattccaagaaccagtccagtcttggaagagcaggaactcacccaccaccgagagaaaaacaccaacatcccattcatgagggatccacccccaaacacagaaacctcccactaggccctgcctcccagtacagccacattgggaatcaaatttcaacgttagttttggtgttgacaaacagaccatatctaaactgtggtgctgtgtgtcttagtcccttcaggctgctataacaaagtgccttagactgggtaatttatgaacaacagaaatgtgttgcttacggttctggaggctgggaagtccaagctcaaggtgtcagcagctttggtgtctgatgagggcctgctccctgcttcataaataacacctttttgcagcatcctgacatgctggaaggggcaataaagctcccctaaacctcttttataagggcattaatcgtattcacaaggcctctgccctcatgacctagtcactttccaaagtccccacctcttaatattatccctttggggattaagtttccacataggaatttcggggggggcacatacattcagatcataccactcacattcacaaggtctctgccctcatgacctagtcaccttccaaaggccccacctcttaatactatccctttggaggttaagtttccacataggaatttcggtggggggtgggtcacgtaaattcagatcataccacactgtaatttaaaacttaggaactttgagaaataaaatgttttgtctctttgtaagagacttatcgagtggtttgaacagtgcttgccttctcattgtatcctttgcagtctagaatgagcatctttcctatgcctttggcaagtggtcagttgtcctttctaagtaattgtcatcatcatgaaatgtctccaagagttcctttaacacaaactttttggccgccataacttccttcaggaactacatacctcgtcattaaattcactttcactgagatcctctggctgcatatcccaagttttcttcagtggcagcagtgtcaacattcctgtggccaattatttatttgttctagaattcatttacatgtatgtctaattttgcttccagcattatcactttgtgggtttttgctgcacttcgattttgttggccagttcctctcttgtgactatccattttcgtaacacgtcctgcaggtttagcattgggagataaggatgcagcataactacatgttttgctgtcgggaagtgaactgcatagcacaatgaccagtcaccagctttgaaaggcttgcttagtcactgggcatgatgcatctctgtttacatagtagactgaagagctgccagtgaagtttgttctctgcagttactcacagttcgtattcccatagtagttaataactgaaatttgaaccatcctgtcgggggactgataatgtttaactaagccatagtaactgaaattcatgcagctcggaaccgtgcaaagcaaggaacacacacacacacacacactctctctctctttctctcactcattgttaggcttcttcttgtgtattttattttattccattgctgttataaatagttttttccttcttgctagcattttgctagcattttaatattgtttccatataagaaagttgttgatctggacggaatgttagttttgtggctttattgagttattatttgtaacagtttttaattttctattggattgttaaggtatatcattatattatctgcaaatcattttctcatactttcctttctatttatagcttttctttcttttttttttttttcttgagacagagtcttgtgctgtcacccaggctgaagtgcagtggtgcagtggtgttatcttagctcactgcaacctctgcctcccgggttcaagagattctcgtgcctcagcctcctgagtagctgggattacaggcacccgccaccacacatggctaatttttgtatttttggtagagacagggttttaccatgttggccagactggtcccaaactcatgacctcaggtgatccacccacctcagcctcccaaagtgctaggattacaggcatgagccaccacactcggcctatacctcttctttctttctcttgtctgattgtcctagctggtacctccacaacactgcatagcagtggggatagtaaatgtccttgttctgttcttgaacttaatggaaatgcttctggtgtttcctaattaagcttgatactagttttggagttgagaaagttatatttttatgatattgaagaattatccatctactttattttgtagagaagttttattaggaatgtatattgggttaggtgctattggtttaagtgcctcctgagtatggcagtaggaaatacacagctatacccatggagtatatttgtaaaaaaaaaaaaaattaaatatgaccttgaatctaatgaaacatgtagctcattggttcccaactaagggcttttgccccctcagaggacatttgccgatgtctggagacattactgcgtttgtcacaactgagggagaaagcactactggcatttagtgagtagaggctagggatgctgctggacaacctgcagtgccccagacagccgccacagtgaagaattatctagccccaaatgtcaggaatgcagaggccaagaaactcttctagatctcactcccagttcacaagaaacatgaaggacacagggacgtgataaacgacatcaccagaaagtcctcagtgtagtccatgctgtgagagattctgcaagacagatgggcctgatatcttcaacagatacatgcatgaggggtgacgggaaagaaagaagagatattatagattaaaagagacttaagagacttaccaaccaaatatgaaatgtagatctcatttggatcctaatttgaataagacatgtctgcaaaaatcaggcaactttaagttagaatacatgaaacaagattagcaaaatgccgacaatcagttaattgaaactggatggtacggattcatcacttttatttataattttccctttgtttaacgatttccataatcagaaatttaaaaatgaatattgatttttttagatttagtctcagcaacaccaatgaaaatatgcctttttgcttccaatcctttcaaatggtgactcataataatgaagctcctaatactgaactgtctgtattcctagaataagcctcccctaaaagaatgagcacatgctggtgcacaaattaaagtttataaactgtgttctcagaagctttaagtgcctaagatttttatacaaagatgattgtcaattgtcagaattatatattctgcataaaacaatagagaattaaatggaattccaccaattccatccaatgtgaaatgctaggcagcttattgtagtcattaaatactttattgtagaaagtttaaattataacagtagccttccataattccaattttataaaaatatatgtatttttaaatactgaaaaatagacctcaaaataataataatggttatatctagtgataacgctatgagtgatttttattttcttttttttcctatatatttctaattttctacagcgaatttttgaaatcaggaaaaaagttatttacaaaattaaagcagttcacctgtcacccaaatcttggtttctgatacctttctccaataaaagaactggagaaattatcagtctagtctaggactgtggtggggaatatgcaaagtgatcctggagcgtctcaggtccagcatgtaaggaagtgcttaagaaacaaaacttgaggtgtggcagcaggacacgggacccaaccacagaggcccagggggcaaggctggaggagtttgagcaacaaaataaatagtgcaatacagaatttgcaccaatgtagggaccagccccacatgatcggtgggtttttctccctgtgtgcagagacgagagattgtagaaataaagacacaagacaaagagataaaagaaaagacagctgggcctgcgggaccactactaccaagacgcggagaccggtagtggccccagatgccaggctgcgctgatatttattggatacaagacaaaggggcagggtaaggagtgttgagtcatctccaatgataggtaaggtcacatgggtcacgtgtccactggacagggggcccttccctgcctggcagcagaggcagagagagagagggagagagagagagacagcttacgccattatttctgcatatcagagacttttagtactttcactaattttgctactgttaactaaaaggcagagccaggtgtacaggatggaacatgaaagcagactaggagcgtggccactgaagcacagcatcacagggagatggttaggcctccagataactgcgggcgggcctgactcatgtcaggccctccacaagaggtggaggagtagagtcttctctaaactctcctggggaaagggagactctctttcccagtctgctaagtagcgagtgtttttccttgacactgacgctaccgctagaccatggtccgcttggcaatgggcatcttcccagatgctggcattaccgctagaccaaggagccctctggtggccctgtccaggcataacagaaggctcgcactcttgtcttctggtcacttctcactgtgtcccttccgctcctatctctatatggcctggtttttcctaggttatgattatagagcaaagattataatagtattggaataaagagtaattgctacaaactaatgattaatgatattcatatataatcatatctatgatctatatctagcattaactcttgttgttttatatattttattatactggaacagctcgtgccctcggtctcttgcctcggcacctaggtggcttgctgcccacatcccaaagtataaaataaccacgtgtccatactgatgtatataaatggttgaataggtgggtgagaatagacacaccccatgcaaaagaattccatgtaattgacgtagatacccctccctcaaggaggcagttgattatcccagctcttacgtgtgggctgcacccagtgacccccttcccagtggtacactttggaaaccgggttgagaaagaggaacttgaccctggagaaacctgacctcagccaggggaggaaggtcaggggtgagttctcctgagagtgggatgtggggaggatggcccttttcctttgtagcctttctcccaagaacccatcagctcagtctaaccatgaaaaaaaacagcagacagccccaacctgagggacattttacaaaatatctgacccatgttcctcagatctgtcaagggcattaaaaacaaggcaagttggccgggcttggtggctcagtgcgtgtaatcccagcactttgagagggtgaggcaggcgatcacctgaggtcaggagttagaaaccagcctggctaacatgacgaaaccccatctctactaaaaatgcaaaaattagccaggcgtggtggcacacacctgtaatcccagctactcgggaggctgaggcaggagaatcgcttgaacctgggaggcggaggttgcagttttccgagaccacaacgctgcactccagcctgggcgccagagtgaaactccgtctcaaagagacaaggcaagtaggagaaataattgcagtctagaagatcttaaggagacgtgaggactaaaagccatgttgtcctggatggggtcgtggaacagaaacaggatgttaagtacacaccagggaaatccgaataaagtgtggacttcagttaataatgatgtaaggaacattggctcctgatttatggcagatgtaccccaggaaggtaacatgttaacagtaagggaaataacttttctatatatctgtatctatacctgtaactattctaaaattagaagctttttttttttaaaaaaaaaagggaaaacagtaaacaatagctcatcactcttatttttaaaaggttggaataacattagagatgttctataggatcaatttgagatttctggagtttactttctgacccagttttctcaaaaatatgaaattcttgttgcataagtctgacttgtcactgggggatcattccagataaagaattttctggtgaggcctcgggaccacatctgaatgaaagtgaggaggcgagtgtctgaacagccagcatttcgtgtctgtttcccctctgcataacataaaaattaacgtatgatagcacaacatatgtaaagtcaccttggtagaggcactaggcggaagggagtgggcatctcttggctggcaatgagctgggtgcccagccatcatggtgcagggcagttgcccttctcaagcaactgatccagagacatttgagcaggggactgtgaccacactacagtacacaccacgaccgtgtgacagtcacagatacagacactgagtttaatggcttgggggtggagaagttgccagttgcccaccctctgataaagatgttagtgaaaatattatagatttattgaggtttgtcaaaaaattgctgcatctcagatataaatgggcaaaataaaatgaattaaggttagggtttttttgtagataaccaagaataaaatgtagtgattttgttttattatgccagctgtaataaagtcttaaggagaatgcaggctgtaaaagcttaaagagaataggggaacaatttttttaaatatttaatgaaatgtcaaacattttaccacattttgaagaaataaaacattgtagatatagctaaagcctcactttcttacttcttcaccccttcctcctgagaggtaacccattgtcttgacagtgatgtgtatcattgcaggtattcgtgaataacttttctatgtatataacatatgtatgtgtatatacatacatatggatgtattaagtaatacattctgttggttttggtgttttaacaatttatttaaattaaaagcttaacagatctgtttatttttcttttcactgatcattattggcattggtttctggtgctaagtgtagatctcatgggggttttttggttgttgtttttttttccactttgtaacattccactatatgaaaataaaccaatttgttttcatatgcttgtggaagaacagtcactgtgggttgtatccttttttggtgttcatggctaggatgattcttgtatgtgtttccttgtgaacaccagaattgtgggactacaggtgtgtgccacttcagccttaatagatattgccaaattgctcttcagagtgccatacataaaatttgtacatttccatttttccacatctgtgaaaaatcttaccagatttatcagattccacattttatcagactcacttatctttgccagtctgaggggtgtgatacatttccctgattgttagtgagattgaacatcttttcatatagttgaatttattagaagtcctatcaagaattgcctatttaggccgggtatggtagctcatgcctgtaatcctagcacttagggagtatgaggtaggaggatcacttgagtccaggaggccaaggctgcagtgagccatgattccaccactgcactcaagcctgggcaacagagcaagaccctgtctcaaaaaaaaaagaactaactgcctgtttattgcctgttaagtgggctggtatttcttagagacctttggccttggacctgattcctcagagtgtatgataaaagaatacagctgcatgctatcacaaagttaaattggaggtgggtgagaaaaagagtttagtctttgaccgtatttaattgttttatttactcctatgccgtttgattttctttgtgcctcgttattgctgactgtgtctcttattggtgtaggaaagagttcaggtaagtaagttatctggtttgttaggtttgtaattaagtatttaacaaaaatgtctttggaaaagtgcatttgcagtttcctaaaaagatgacagttttacaatacgacccagcaattatgctcctgagtgtttgcccaaatgatgacaacttttatccttataaaaacttgggctttccttataaaaacctgcgcttgctgggaagctgaggcaagaggattgcttgagcccgggagtttgagactgtagtgagctatggtcatgccactgtactccagcctgggcaacagagtaaggcccagactcaaaagcaaaacaaaacaactttgcacatgaatgttcctatcaccaattattcataattgcaaaaaactggaagcaaccaagatattgttcagcaggtgagtgaacaaacaaactatgatacatccacacaatgtaatattactcagcaataagaatgatcaagccctgaaagacatgtaaaaaccatacatgcatatcgctatgattccaattatgtgatcttctgggaaaggcaaaactatggagtcaacaaaaagatcagtggttgcccgggattcaggggcaggaaggaaggatgaaaaggtggagtacagggcatttttagggcagtgaaactattcatatgacgctggaatggtggattcatggcattatacctttgtcaaaacagaattggctgggcatggtggctcacacctgtaatctcagcactttgggaggcaggtggatcacttgaggccaggagttcaagaccagcctggacaacatagtgaaaccccatctctaccaaaaatatgaaaattaggcaggcgtggaagtgcatgcctgtaatcccagctactcaggaggctgaggcatgagaatcgcttgaacccaggaggcagaggttgcagtgagccaagatcacgacagagcaagactgcactccagcctgggagacagagcaagactctatctcaaacaacaacaacaacaacaacaacaaaaaaccccacagaattgtacaacacaaatagtggaccctaatgtaaactatggacttttgttaataaaaatttatcaatatagattcatcatttataacaaatacagcacactgatgttaataatgggaggaattgggtgcaggggaggaggggttataggaggactcagttctatctgaccagttttttctgtaaacctaaaggcatctaaaaaataaagtctattaatttttctaaaaatctttcattgttaaattcagattttaccaagtgtactcaagtatgtggaacaattatgttttctaatagaaactttttaagattatttgttttatttatgaaatctaaattgctgaagctttttcaagacgactgcttccattttttgtggatctataaagaatgcacagttcatgttgaaaatcatttcgttcctttttgctttctcaagtagtagagtggtacaaagtattaattgtgtaagtttttctttgtatgattaaataatttagagcaaatattttgcatattactacatcaaaaatctttccaaatattgtaataactaaagtaatctggaatgtttgtcttgattcttactaattctttataatataaaagaccttctttcattgattctaggacttccattctaggacctctctgaaatcagtgtacctcttagaatcagtaacatcttagattcagtgaaatacgatatgtctaataagggttcggaggaagggctataataattgttacagaatcatgataatttttcactgatgttatgggaccgttctgattttcccttgcctgcctgtcttccagatgctctctgtgtgggtatgtgtgtagccatcctccttctttgaagtctcatatgtggaaacatgcaagtgaccaaaattacaactacgaacaagtaaacaaggctattaacgacgcgatttcacaaagtggcaggtatttcatcctaccccctccctttattgctatatgtaaattaaagccaggattaaatctactagtcctacattgtagcctcctcacggtgtgctgtgtttgttttgtttttaagagttctggggaaatcccctggaaagactcaattaaagagcagtgaagagagtgcagatcccgtcactggaagttcagaaaatgcagtgtcatcttcagaactgatgtcccagactcccagtgaagttctgggtaccaacgagaatgagaaactgagccctacaagtaatacctcatatagtttagaaaaaatctccagtctggcccctcctagcatggagtactgcgttttactcttctgctgttgtatttgtggttttgaatcaaccagcaaagaaaacctcttggatcatatgaaagagcacgagggtgaaattgtaaacatcatcctgaataaggaccacaatacagctctaaacacaaattaggtggaataatgactcgagcaggaaagcagtagaagaggattccttcaccacagtttcacctttacgctgtcagacaacttcctgccacagaagaagtcgttgatgtgatttttgaggaaatgacagatgtgactttggaaccaaacttgtaataaaaggaattccaaatggacaagcagtaatgatatttaaatattttgagtgagggggagtgggtcaaagaggaagtagaggtgtaatcctgtattaaccctctgtcaccccttcttagtgtcgagtgtatttattaataaaagcttattagagtgtagaaatgccagcaagagttaagaaagggcttttcaggaactattctaaaagtcataaaagggtcacagtcttaagcagagcttagttttcttctcacttgtcaaatgcagactgtgaggcctccagtgagaaatgggaggcagttctgggagggggttttttcagtgtcaccaacagagtcaacaaggaaacataattagagggctttgaaatgatctactgaaatacctaaattgatagaaattaatcatactcaatctaggacatgttcctttactccttaaaaaagaaaggaaagatctctaaattcaaagctagattgtaaataggcattcaagaagtattgtcttaaatttacgatgaatttcttgtgagcagaggacgaaacaggtgaattctcaccagactcaaaccagatctcaattcgtagtaatgctaaatcgtcttccgtgttctcagaggttcttttcagtgtctgtcagaacttggcatactttctccatagtacgtagaccttctaatactctgctaaatgaaaccacacttgttatctgaaagtgtgtgaaagaaacaatgtatgaaaatttacatttgatcatccggcattggaaatagtttgaactatttccaaaaatcccttaggggatgaggggtgaaatttaaaagctcctgaaaatgagtactgctgtgttgagcttttctttcctggggtatattaatttagttatatttagcagaagaggaatataaccaaatgtgactaaaatatagcagaaattcaggttgtttgtaaaaattttaataacaaatagcatttggcaagtctataggattcttcctatctggaaattctattttgttagagtgcgataggacatatggaaaaccaacacaaagtgctttagcattaaaactcaccatcaaatagatgtaatcttattaattacacattttgtattttaattatttcaaggagtgaagaaaacagggtgtttttgtttttgtagttctgattactcatttatgcattgttttgtttaagtaaattctgcctacaagtgaaaaggtcggtgcgctcttctgtgcaccatcctcacggtgctatttccgaatatctgaatattgatttctaacacctggatgaggctgtgaccgatcaacttggaacactgtaaaggttttcgaatgggatacgctgtaggcacgttttaagaagtattctgttcctaaagtccaggtatgattggattaatatttataaaattattattaggaattatttaagtggggccaggcatcttgcaacattttctgatttttttttctttctttctaatctcattttggtgatatttaaacaaacataaatgattgtaactttgcagcttttttatttaggtagctttaatttatttatgaaagttaatccatttctgatacgtggtttttaaaaatatgaaatggatttatatatactatattcctcaaatccactgtatgtggacttatattcattttctccttttttcggaattgaaacattttaatttcaaattcaaatagaacatttaaaatgatttcattattattacccatactgttgccactcatattgtaagtcagttttttcattgctggtacaatgactcagtatttctttataaaaatctgttgttctgaaaatcaacaaccttagaaggattttgtcttagaaaatttccttggctttagttttatatcatatttagaaaataataatgaaaagcatccccaaaatttcaatgatgtgaatttttaaattacctttatttctttaaactaattccattgattgttacttaaattttccacctggaatcatggatttaaaatttccccacctcatggggaaaaaactaacccagaagttcaaagcctttaaagtttcatctgattctggccttagaattgtccttaaaagctttctcctggccgataggaggaagcatatatcaaggaggttctttcccttcccattatcattttgtggcaagccttaagttaacaatgtgtctaccaagaacaattgagttttctaaaagtaataatgaagattatgcaattctaactgtagaagagatagctattaaaataatcagtagcctgggcatagtggctcacacctgtaatcccaatactttagaaggccaaggctggaggactgcttgagtccagaagtttaagaccagcctgggcaacacggggagaccctgtctctacaagaaattaaaaattagccaggcatagttggcacgtgcctgtagcaccagctacttgggaggttaaggtgggaggatcacttgagcctgggagatagaggcttgcagtgagccgtgatggcaccattgcactccaaccggggtgacagatgaggtcctctgtttacctccccccccaaaaaaaaaattcagtaggaattccttcatagaataacatgttatttattggtattgacttcttattagacagagctcatagtatttgttttctgctccgaacacttaaaaaatactaagacgtgatagtgaaaatagctttgaaaagaaactacatatggcaaaggtggggaggggggaagatgatgcattctgatcattataaagaatacttttcagggctctatcattttctccctttctctaatcatccagaatatggcgggtgtcccagtgttcaacagtatcatgctaatattccatttgatcggtagtccaagttctttggccagatagtgcaatgttgtgacaccgaccgaagcctttgttctggatctttcttcctattgaaggtggctgctggtggcttcataattttctgttttttttctcacaaagtaaatggtgggcatccatgtttacattgcaccttcccgtgctgtaattggcttgacaaagacaagcaggcttctctgttgagacttattgtgtttttagttttcatagacacttatttaatctttttaaattgtacagcaaggtgctctaagtaatattcgataaaatatatttaatagaaatttgcgtttgatattcatgaacatgaatacatgtatttttttaagaaataagtattgtgtaacactatggcattgcttctatagccaaagtataaaaatttctggaatactgacatgtaaagactacagttaattctgacactgtatcttattaaaataggatgatttgcattttgtaaaattatcctgcacatcaagctgcatgccttaaagcggaaactctaggactgtgttcatgggagagcagttcatctgttcagaacagtgaggcaaggtctgtagtgcttctttaactacctttggaaatactgtacaatgttagaataatttattttgctttacaggagtttgtcatgtattgactttaatattgtattttggtaataaattttttgttaaaaaaaacttggctccaagttctattaaccacaggttgtgttcattcttttcctggaaatgatgactttattgcttagaaagttgtaaataattaaaagcttcccaagagttaaatgaaggttatgatgactcttgataacttgttaatctgttgctgactagcattagactgttacacgaagataaactgaataagcatttagctttttaaatcattttaaaaattaagtctaattttgaagcttttttccttgctacccagttcagtttctcttccaaatgtgacacgcttatatgctttcaattctgatatagtcaaagtgctaaagactagttctgctattgacgaaggaattagcattccttagtgaaggccaaaaactacagtgatatgttcacaccttgatcactctgtcgtctatacagacagctattgacatatttgttgcattgacgaagctaacatcatctgactgtatcgtgggtctggttatccatttgtgccctagaatcctgggtcacctcagttgaaagtgaccaaggccaaatatttcgtcccatgcttcccagggacaacataatcatatcccctgtctttgaaaaacccaatctgaaactgtgtcactaacctccaaattaaagaatccgagcatggaagctctagaacgtatggtccagtgtggcagccactataatatctaagtgtaaaatacatagcagttgcaaagacttagtacaaaaagaatggaaatgtattaacagttttttatattgattacatgttgaaatgatattttggtttaaataaaatattaaaattagttttacctgtttctttagctactaaacagttttaaattacatatgtggcttacattatatttcttttggacagcgctggtacagaagagagattagcaaactagggccctctcttcaaagccaacctgccacctgttttggcaaataaagttttattggcacacagccatgcttttgtgtgtgtacatatcatatatggctattttcaaggtacaacagcagcactgagtaattgtgacagagactctatggcccacaaaacctaatttaccacctatctgatagaaaaagtcttctgactagacctctgaactagaacaatggtataatttgtgctctagagctaccaggaagaaaacggctttttacaaagaaagctttttatagtagtgctttataactaaattagtttcttcctttgtaatttttatagtctacctgtctacagattttaaccatattttatgactttaacctattccatcgctgatatttaaagccagtttgaaataacaatgcataattaaataataaactaattcaaaatgcagctataaaaagtctcgcttgcctcctgacagctttacggtgttgatgttggcccccacggcttcaccctgtcagtggtgtgggactacagcacatggcctgcaaatgtaaccatggtgcaacgtaaccccagtgactaatccacttggctggggtgacagttgaattgaataatccaggatataaagaaaagagtcttaaatgcacctctttataatgaatagcatgtgcaactccaaagccagcttcaaaggtagggaggaggtggtagttggctttggtctagagctgttgattaaactggcagagctacgaaaaagtccatactcttatacatagatttcttccaagtcaatcagtgaatatgtaaaatgagaacatttttggccctgtaaattcatagagaagttactaattggtgccatacgatagactgacttaggtagtgtgttttggtgtgtatctcagaatccaaatcagcggagcatgaaatgctgaaaccatttccagagacctatgtgtacagcacaatccagtttgcatgctgtgctaggggactatagacctcatttttctagtggtacattaataaatatactgtatctagttttatttgaactgtttataagattatgacagctttggtttctttaatctcctgattttttttccaataatgggtaatcagtttaaagcgtttgccttaccaaagtagattatgtaggtaagaaggttttcttttgaattaaaaagtttaatgtcaggcatctaatataaattcttactggcatataacaaaatcgtatcacgtgttggtggctttttgctccctaactaactaaaccagatttacaccagttgtgttacttaatccagatagaaaaggtgtcattctgtaataatttgtaaaaatgcatataagacaggtacttctacaatggggtgtttgttttaaaaggattctacatattaggtaaatgtggaaaaaacatcttaaaacatctttaaaaaaaaaattgtcaccagacgcagtggctcacacctgtaatcccagcactttgggaggctgaggtgggcagatgacttgaggtcaagagttcaagaccagcctggccaacatggtgaaatcacatctctactaaaaatacaaaaattagccggttgtggtggcacacgcctgtagtcccagctacttgggaggctgagcctggaggattgcttgaacctgggaagcagtggttgcagtgagccaagatcacactactgcattccagcctgggcaacagagtgaaattccatctcaaaaaaaaaattttttttgcacaaatcagaaaatcatgaatccttagccatgagctcagacccaactagttcacctttctgatttctcagctttgtactttgttaaaaggaaaaacaaaaaagaatatttataattacccatgttactaccatggattcatcagtaataatcaagtatggttttaaaatgagaaagtatgttatcttaaatgtatacacaatggaaagctggacctgaatagaccctcaacaaaataaaacattcatttttcaggacttttattagcacctactagtgacgtttaaaggcttattgtcacaactgtgcacatctccaattttttttctacttgtcatctttagtatccatatttcagaaataatgtggctgtgttttactgaaataggcacatcaatccacatcttgttctttttgtttatatctgcagtcccatttaaattcagtatttccaaccacaaacggtgttagaaaattctatttccagcttatgagaaaaagtacagcaggatatggttcaaagcttaagctgtatttatttctgctcttccagagctagcattccacacaaaaaaagttatgctgaaataaacagtggtaggaaaccaatggtttcaaggctatctgcactttctaaaacccttctccatgtgaaacctgggaacacagttggtgcggctatgcctccctggaatgatgatactggagtccaccacagttccatcgcagaggtgaaaaactctaacatgaggctcttcagcatttgggcccacctggagcaaccctgtgctcagcctgcaaatgcagacaaaaacttcagtgtactaacagttgttttttaaagttccagggtacatgtgcagcatgtgcagacttgttacataggtaaacatgtgccatggtggtttgctgcacctatcaacccatcacctaggtattaagccctgcatgcattagctatttatcctgatgctctccctcctcccaccccaccccaccacaggccccagtgtgtgatgttcccctccctgtgtctatgtgtcctcactgatcagctcccacttataagtgagaacatgtggtgtatggttttctgttcctgcgctagtttgctgaggataatggcttccagcttcatccatgtccctgcaaaggacataatcttgttcctctttatgtctgtatcgtattccatggtgtatatgtaccacattttttcagtctatcactgatgggcatttggatttcatgtctttgctattgtgaatagttctgcaatgaacatacacatgcatgtatctttgtgatagaatgatttatattccgttgggtatatacccagtaatgggtactactgcatcaaatggtatttctggttctagatctttgaggaattgccgggcgtggtagcatgcacctctaatcccagctacttggaaggctgaggcaggagaatcatttgaacccgggaggcggaggttgcagtgagccaagcttgcgccactacactccagcctgggcaacaagagtgacactccatctcaaaaaataaaaagtaaataaaaataaaagtatacctgcaaaccagtccaaatgctagtcaggtgccatcttcaagtcaggtgctatcttcaagtcaggtgccatcctgcaggcccaaggcatagcttactagttctatcgagtggcctcgtgatcaggtaggaaaaccaaatcagcacttgtctttaaccataatccacgatgaaacttactcttgaaagataaagtggaacaaggcatggcgcagtggctcacacctgtaatcccagcactttgggaggccaaggcgggtggatcattttaggtcaggagtttcagaccagtctggctaacatggtgaaaccccatccctactaaaaatacaaaaattagccaggcatggtggtgggcacctgtaatcccagctactcgggaggctgaggcaggagaattgcttaaactcaggaggcagaggttgcagtcagccgagattgcaccgctgcactccaacctgggcaacagagtgcgtgagattctgtctcaacaaaaaagataaagtggaacaagagcttcatagccatattcctaactaggttataccttacaaaactaacaagaatacatatggacatgagatacaaagggcatgatcgctaattaaaaccctaaaacagtaacacctatctactgtaaacagacaagtcagctgcacctatacattgtattaaataccgtaagagtttttgaaattcaagaagacatcaggccaagtacagtggctcactgtaatcccagcattttgggaggcaaaggcaggaggatcgcttgaggcctggcgttccataccagcctgggcaacatggtgaaaccccatctctacaaaaataaaaattaaaaaattagcctggtgtagtcccagttactcgggaggctgaggtgggaggatcgtttgagcctgtagtgaactgtgattgcaccactacacaccaccctggttgatagagcaacatgaaagaaaagaaagagaaagagaaaaaaaaaaaggaaaggaaggagggaggaagggaggcagggaggaaagaagggggagggagaggaaggaaggaaggaagaaaggaaggcaggcaggcaggcagacgaggggaggggagggcaggggaggggaggggaagggaaagaaagaaggaaaaagaaagaagaaagaaaagaaaaagaaaaaagagagggaaagggagggagggaggaagaaaggaaaagaagagtgagaagaaagaaaaggaagaaagggaaggaaggaggaaggggaggaaggggagggaggaaggaaaggaaggaagggaaagggggagggagagagggagggaggaaggaaggaaggaagggagggactaatggtgtgcctgacgccatacacatcaaccttaaccttcaaaagaatgtacttttcacatgagtaatggcaggtactgccagttgttcctcaacatccattcttctatgatcacagaatttttagctgggcacaaagctgcccaggtaggctgtatttcccaggcttccttgtagctacatgaagccatgtgaccaagttatggttcatgggatatgagtagtgatacatgaaacttctgaagatatcacgccaggcacagtgtctcatgcctgtaatcgcagtactttgggaggccaaggagggagaatcacttgaggccaggagttcaagaccagcctgggcaacatggtgaaaccccatctctacagaaaaatacaaacattagccgggtgtggtgacacacgcctgtagtcctgttacagtaggcaaacagctagacatgagcaggagggggagcccctgagaaaaggaaggtctgggaagcctcatgcccaaggaccacccaaaatttgctaattattaacatctctaatggtggagggggtgggcaatgagtccagtgtgagcaaggaggagggtaaatacctatgcagaaaggagcaccccttaagactcctagtaatcacccactcttcagttaacctctcagaatgtcactagctgtgtgctgataaggagggaaagagggcaaagcagaaattcctaagagataccaggtgcaataaatatagatctgacctctatacaacctcctggggtggcggcaatgagcaatgcagccatttggtagagttcatacccaacaccggccacacatacccaccaactagtagtaagagagggtcccgtgagcctgggagggaatgcggcagggataaaggcagggacttaaggcagaagcagggaaactagacaaagaaaaaaggcagggacttaagacagaggtgggaacttccagaaaaaaatctgacatcattaaaacccaccgcagaattctcggggtggctgctggctcattctgtctccacagctggctctgcctcatctttcagagtattctgtctctctaaataaactctctgctctctattttccttcaatcaattctctcttttttggctaaactgcctcgtggccaaattccttctcccaaggaagactaagagctgaggactctgcccttccaggtaacacccccaactactcaggaggctgaggtgggaagattgcttgagcccagaaggtcaaggctacaatgagctgtaattgcaccactgcactccagcctgggcaacagagtgagatactatctctaaaaataaaaataaaaaatatttttctaaaaaagagattaaatgaatctaggatcacagagttcaaagttggctgagaaaatataccagttgtccttgaaacattcactgtatttgatggctatcttttctctaaacatattgtaatgcaaatataaaattgttttgttttataaaacaatagaatacatcagctgaagttacccccaaaagaaatgaaagaaacttctgggtgtgccctcaaaattaaggggagttccacctccccttctttctctgttctgccacctgttatgtaaatgttatgatcactgactatgagaacaagcacaggacagaactcctaaaactcaacaacaaaacccaattcaaaaacgggcaaaggacttgactagacatttctctaaagaagatctacagatggccaacaagtacatggaaagatgctcaacatcactaatcattaaggaaatggaaatcaaaactgcaatgagataccacctcatacccattagggtgactactatcaaaacataaaaaagcagaaaataataaagtgttggtaaagatgtggagacactggtacccttgtgcaccattggtgagaatgtaaaatggtacaatcactgtggaaacagtatggtggtctaatgggcacagagtttcagtcttagaagatgaagagttttggaggtatatgctggtgatggttgcacaacattatgaatgtaataccactgaactggacatttataaatagttaagatcaggcaggcgcagtggcaatcccatcactttgggaggccaaggcgggcagatcacttgaggtcaggagtttgagaccagcctggccaacatggtgaaaccccatcactactaaaaatacaaaaattagccagatgtggtggcgggcgcctgtaatctcagacacttgggaggctgaggcacaagaatcgcttgaacccaggagatggaggcttcagtgagccgagatcacagcctgggcaacagagcaagaccttgtctcaaaaaaaaaaaaaaaaaaggttaagaaggtaaattttatgtttttttgccacaaaagaaaaattttttaaaaaacaactgtgacatttttgttggaaggaccctgggtccctgacattgtggaaccagactgcttacatgacagaaataaacatcatttcagccactgtcttttgggtcagtactgaaccctcagctcttatttccagtctgccccaccatttacatatagagaaatacattaaagggaaaagtaaaccaccaggattctgcaaggatccaaccaccaaaccctagtctacatcggtgtttccacctttatttcattaccatcctcctaagcccttcaaggcatttttcccaattaatttccccacccatgacacagaagtactgtattgtttatctttctaggtactgtaagtgtatctatgctttttccttttttctttattttgggacggagtcttgctctgtcacccaggctggagtgcagtggcgtgacattggctcaccacaacctccgcctccaggtttaagcaactctcttgcctcagcctcctgagtagctgcatctacaggcacgtgccaccacacctggataatttttgcatttttagtagagacggggttttgccatgttgaccagggtggtctctaactcctgaccacaggtgatctgcccacctcggcctcccaaaatgctggattacaggcatgagacacagcgccaagtctgtacatctatgctttatacataaaaatagtaatttttttcaacccccagggaccagttttttcccactggggggtcatattgccatagggaattcacccttgtatttaaatgaactggtttaatgaagatagttacaggaaaagctatttatttcaaacctcatttcctggtatcttgactgaacatccaaaagggtcaagagattgtgatgagaaacctgtgagaggaggctggatttgttacctctatcacgtggagaatcactaaagtacaacaaaatcaactcagtacagctagactccatctagctgttgggatagtttccatctcagagcttttggacctggacagttgcaatcaaacctgtggactttatgcataaggagtcctttgggttagctcatctctgtccaccagttgactcaggaaggtttgtggggagcacttgataagtgttagtgaaaatccagccctgcactagattagccataatttaaggcatgataaaatgtctgaattcgagagtgttagaaacacatccttttctggctgaaagtcctgcttacaacagggaaaaaaaaaaaaaaaaaaaagtcccaggcctgacaatatgccttggcatctattagtgggaaaaatctgctgctgagatttgtggacacatgtgtacatgcctgttttgcaggaaatgacattacagcagtccaaggaaacaaaccagaaggaccagccaaggacactgattctcggactaacatctagagaatcagcacatgtggcaaaagcttatgcaataaaacatcatcatctgctttaactgaataccttacctattcgtgtcctcattcaaaaatacacaacagttattctaaccatggaaatggaaaaaagtgtaggtggtaaccatggaaatgaagaaagtacagacaagtagaggtaagcagagaagcaggtgttaaagaagaaaatgaggccagacacagtgactcacccctgtgataccagcgctgggggatgccaaggcaggaggattgcttgaggccagaagtttgagaccaacctgggcgacatactgaaaccccacctctactaaaaattaaccgggtgcaggggctcacacctgtaatatcaacaatttgggaggccaaagtacgtggatcacctgtggtcaggagtttgagactagactgaccaacatggtgaaaccctgtctctaataaaaacacagaaaagttagtgaggcgtggtggtgcatgcctgtaatcccagctacttgggaggctgaggcaggagaatcacttgaactcaggagatggaggttgcagtgagctgagatcgcatcattgcactcggtctgatgacaagagtgcaatggatgacaagagagaaactctgtctcaaaaatagtaacaataataatttaaaagaaaatgaaacaaaaattccatatgtaaatactttgtgaactttacattttatagaatccttggatttgtgcacctacgctaatctgtctaaaaatttcactattttaaagcactacaaatctagttaatataaagttgaacaaaggaagagaaaaaacacaaacaatatttcataatgctttttctgaatgttcccggaccaaatcgagggtcaggctgcttattctcacagcccaataatgagacgcagatgaactgggaaaggagggagtttatttctgtaactggatacagggagaaggcctagaaattatccccagaccaactcaaaatcacagtgttccagagcttatataccttctaagctatatgtctgtgtgtaagtgtgcattcatctacagacataagtggtcgactttttctgatctctaactaagatctgagtcctgaagaccttcccctggagcctcagtaaatttatttaatctaaatgggtccaggtgctggggtgattacccttatcttgtttcctgctaaatcatggtttggggagttccttcagaccccaataaacttgcctgtggaggcctggggagtttcttcagacccccaataaaacctgtataatcccaaacgggtcctgtggaaaattcctcattatcttgtcatgcttcaaggcccaggaaaggccagggcagaactcttggtgggcttttgttacattccagcatttgtatagggcactggctctatcagcttttaatatttaacttcgccactcagtcagtactgaaacggttgtcatggaggcctgcattagtgagacctggcctgccacatgaagactcacagaggagaagccatctattgacaaacattttaaaggagggaaagaggaatccaatgtgatgtcagtgactgtgggactctggaatgatgcgagcatagaggaagctcatccctgacacttggcctgggttccctaagacccacgcatgccaagccaatctcagaggactgccatagacaggccccacctctgtggtctctgacatgagtcatacacagtgtgtgtaaaacaatccaatggaatgtatgcagaaaacactaggatttccacgtgtagtcactttgcttaaaaatatgtttatatgggctgggtgtggtgcctcatgcctgtaatcccaacattttggtaggccaaggctggaggatcacttgagctcaaaagttcaagactagcctaggcaacatggtgagaccttgcctcatttaaaaaaaaaaatgtttatatgtatacagaaagagaagacaaaatttttttctgataaaagtttggaggctgggcgcactggctcacgtctgtaatcccagcactttggggagaccaaggcaggcagatcacttgaagctaggagctcaagaccagcctggccaacatggtgaagccccatctctactggaagtacaaaaattagtcaggtgtggtggtacacgcctgtagtcccagctactcaggaggctgaggcatgagaatcgctagaacccaggaggtcaaggctgcagagagccaagatcgcgccactgcactccagtttgggaaacagagtgaaatcctgtctcaataaataaataaataaataaataaataaataaataaataaataaaagaagtttggcgaccattgcattgacttttaccaagatacttgaaaagtcaactaaattggatgaaagtactgttggaaaaaaatatatgtagtataccaaactgccccatacatgtttctgtaagggaatactcagcattgtaaatatctcatttctcccaaacatttctaaacactttatataattctagtaaaaatttccatggattctgttttagaacttagtaaatgattataaagtttatctgagcaaataaatatgcagaaattgccaaaatatgtggttaaaagaagtgtaatgaagggtcaattgccctctcaatatgaaaacattctataaaataattaaaaacatgtagaactgtttcaagactaattactttttaaaatcatttaaacataagtgtcatcttataatacaaaaattagccaggcgtggtggctatagtcccacctatagtcccagctacttgggaggcggaggtgggagaactgcttgagctcaggaagtggaagttgcagtgagccgagatcatgccactgcactccagcctgggccacagggcaagaccctgtctccagaaaaaaaaaaaaaaaaaaagagtgagcttataaataagccatatacatatgggaattcagtatgtggtacaggtaatttaaatcagtagagtaaggatgatggtgaaataatcaactatctaatttaaaaaaaaattgtcaagtctctcccacaccatattaaaaagttataatatttttaaatactagcagaaagaattaaaaaacatttacaatcttgagatggggaaggtttttctaagcatgatggaaaaacccagaaggtataaaagaaatttgacaatataaaaatggaaaatccctgcatagcaaaagacatcataccagatacacaataatgagaaactatctgcagcatatatgacaacagattaataaatacccataatcggccaggcgcagtggctcacacctgtaatcccagcactttgggaggccgaggtgggcagattccttgagctcaggggttcaagactagcctgggcaacatggcaaaaccccatctctacaaaaaattgttttaaattagccaggcacacacctgtggtcccagctactcaggaggttgagatgggaggatttcgtgagctcagaaggttgaatctgcagtcagctgagatggcgccactgcactccagtctgggcaacagagcaagaccctgtctcgaaaacaaaaacaaaaaaaactcataatctataaataatcccgtcacagcaagattaaatagatggtgaaagaacacaaaaagacaaattatacaaaagaaatgcaaatagccaataaactcctgatatattgtcttcacctcattaataaagaatgcacactaatcatgtattatttgtcacctaagattggcaaagatttaaaaactaattgttggcaatggcatggagaaataagtgtcataatacccactggtggaagagaaaaacaatagaatctttaacctttttggaatgtagtttaccaatgtttatcacaatttagaatatgagttctagggctgggcatggtggctcacaactgtaatcccagcactttgggaggccgaggcgggtggatcacttgaggtcaggagttcaagaccagcctagccaacatggtgaaatcccatctctactaaaaagacaaaaattagcccggcatgatggcgggtgcctgtaatccaagcttctcaggaggctgaggcaggagaatcgcttgaacctgggaggcagaggttgcagtgagacaagattgcgccactgcactctagcttgggcgacagagtgagactctgtctcaaaaaaaaaaaaaagaatatgaattccaacaaccctgtttccagaaatacatcctaaagagttacataaatataagtatgttcttacagcattccctgaaatagcataaaactagaaacaacctagatgtccaactagatgggaataaataaatcgtaacacatacatacggtggatattgtattggttatctatcattgtacaaaattacccccaaaacttagtggcttaaaaaaacaatgtacatttattatcctcatagtctctgtgtgtcaaatacttgggagtggcatagatgggcacttctggcccaagatctcttatgccgccatctgaaggctgacctgtagctggccgatctattaggttggtgcaaaagtaatcttggtttttgccattacttttaatgtcccaccaacctaatacttccaagatggctcactcccatggctgccaaggtggtgcaggctgttgcctacgtggccttctctacaggcagtttgagtgtcctcactacatggtggctggcatccccgctaagtgagcaatccaagagaggctaaggctgaaactgggatgtcttttatgacttagcctcagaagtcccacactgtcacttccacggtattctgttgttcacaaagaaaaaccatgattctgtggaaccggatactgtatgaggataaacatgaggcagcacagatcgtgtaagctgaggtctaaaggctgaagagtacctagtcaattaaagagggtttaagactttttataagccacgtgacaaacctctgacagaggtttatgtgaatagaaagtgaaggagaggttgaagagggaaacagagcctgattcgtggcagtccttacaagctgtgtcatggagcttaatttttataataaagccaaaacgcctccaagggatttatattttagtaagatcactatggttattacatacaggtaaatggactacggtggtggcaacagagatgagcaaagtgaacaagatctgaggtatttacgagataaatgccaacaggactcaatggatgattggatgtgtggattacacaatagagaggaatcaaggatggcttctaggctcttgatttgagcaataaggtaaatggagcacacagaaggaaccgcaagtgtggggattagaaaaaggtttaacatgttgagtttgaggtgtttacacacatggaaatgtccaataggcagtggacatatggcacctggagaccaggagatacacctggacataaaaacaggagttatcagagtatcagtggaaatcagatccacgggccacagaatcattgatttttaagaggaagaggaggccaggcatggtggctcatgcctgtaatcccaacaatttggaaggctgaggcaagaggatcgctgcagcccaggagtttgagaccagcctgggcaacagagagaccccctgccacccccaatctttacaaaaaaatttttaaaaaattagtcaggcatggtggtgcatgcctgtaacctagctattctggaagatgagatgggaggattgcttgagcctttgagagcaaggctgcactgagccatgattcagccactgcactctaggctggatgacacagtaagtcctctttccaaaaagggagaagggaggagaagaagaaagaagagaggaggaggaggaagaacaggaggaagaggaagaagaaggaagaggaagaaagaagaaaagaagaaagaagagaaagagaagggaggagggaggaggagtagctgcatgaaacttaaaaggaatgcctgaaaggtagacagaggaaacacgcacagtctgttgtcacagaaggcaggaatgatggagagtgtttatactaagtcaaacaattgaaaaatgaacactgggctgggcgcagtggaggacacctgtaatcccagcactttgggaggccaaggcaggtggatgacttgagatcagaagtttgagaccagcctggccaacatggtgaagctctgtctctactaaacatacaaaaattaaccgggcgtggtggccagcacgtgatgccagctactcaggaggctgagacaggagaatcgtttcaatccgggagacggaggttgcagtgagccgaaatcaccccactgcacaccagcctgggtgacaaagttagactctacctcaaaaagttaaaataaataaaatttttaaaatggacatcatgtatcagacaggaaaaagccagtaagacggaagaactcacaccctcgggatcccaagacaagatacttccatgggatggatgtaatgaacagtgttaaaagatttctggtgcagtgcttctcaaagtgtgatgtacacataaatgacctgggggtcatattaaaatgcagattttggctacacaggtcttgggtaggacctgagacctggcttttctcagaagaccccaggtgatgcccatgctgcacagcccacagaccacatgttgagtaacaaggttctgctgtggttcccaaacttttccgagcacagaattatctggaaaacttctgtactagtccatacagctatacatactgctataaaggatactgctacaaagaatgcccaagactgggtaatttataaaggaaagaagtttaattgactcacagttcagcatggctggggaagcctcagaaaacttacaaacatggcagaaggcaaagggggaagcaaggcactttcctcacaaggaggcaggaagaagtgctgagcgaagaggcaagatccccttataaaaccatcacatcttgtgagaactcactatcatgagaacagcatgggggaagctgcctccataattcaattacctccacctggtctctcccttgaaaggtggggattatgggaattacaattcaagatgagatttgggtgtggacataaagcctaaccatatcaacttcttaaagattagtggtcccctagccctacagattctaaattgagtaggcgtggggtagggcctgataacatgcatttcttaacaacctcccaagtgatggtgacagtgacgctgcagatccccagaccacacttttgagatgcacagcacaactatttgtggccctggcagagacaaccagggagactatttaggcttctaaacctactgcaaaccggaagtcttgctatataccaccactgcagtcacagtccattacaggagcccattccttttatagtacctccctggctccgggctcatatggccagaagtgtgagcaaggacctacactcattatccatcacctccatggttactttatcagaaccaaagactcattcttaattggcttattctccccaagacttactctcagcagtaggtcctacttaggaaaagtctcaaagcttcatcttgcttaggaatgtcttttcatagtattaaaaaaagcagctactgctgaattctactttctttttaactaagcgatgatatttcacaatggtcacatttcccccagagtgaaacaacttgagagaaaaaaaaaaacctataaaataagagggaaatcctatttaaggggaactcaattcacctatgtattcatgaaacagacacatgcacataaaggcatcttaacgtgaaaaataaacatacagtccttgccctcaagccaggcgacagaaaagctaccaacaaccaggctgaaacaagacaaatgccatctgaaaaaacagctgacatttgtttctatcaaagccatccagcagatacctcaacatctttccacagaacgtgtgctctttactaacaaccgacacacaaaggaggacgatctccaacagaggtgactaggaaaggcttcctggatggcgtaatttagtgttggagtcagaccaatgagccgccttttcacgggtggaggtcccagatggccatccctttaacaaaaatcaattaacatgtaaattatgtactgacaaatacaacgtttgatgggcccgctgcagtggctaaagcctgtaatcccaacattttgagaagctgaggcaggaggcctgcttgaactcaggagttttagaccagactggtcaacacaacgagaccccatcactataaaaattaaaatgaatctcagctactcaggaggctgaggaagcagggtcacttgggcacaggggactaaggttgcagtgagctacgatcacaccactgcactccagcctggacgacaaagcaagacccccatctctacgaaaaatttaaaaattagctgggcatagtagtgcgagcctgtggtcccagctactccggaggctgaggcgggaggatcgcttgcgcccaggaggccgaggttgcagtgagccgtgatagcaccactgcactccagcctgggcgacagactgagagcctcacctgtaaaaaataattttaaaaaaggttccacctagtgttttccgtggtgtgactaagaaaagtatctagaaataaagcacagtcagtacctgctctcaaaaaacggctgccaatctagtttggagacagaaaaatatacccgactgagaacacagaggagcctgttttcggaagaggggcgtctttggagacgcaaaatcctctccgcgggacgctgacgggcagtcggtaaaggacttccaagcactggtcagtgacaatcgggcgctggggctttgccaaggcccggaggcggcgcgccaaaccgggcaatgcgggaagcggggcaggcccgagtggccctactgctgccgtccctactgatccctgcgcatccgccacagagcagggaacggcagaaaggaggaaggagggggagttccgtaaatcaggccctcaggggctcccaggcccgcacccctctcaagccccggggaccaccgcggagccgctgctccgggccgtgcggctcgaggcgaacctgcctcagagccgccgggccctcctatcccgagccgtatctctagctccggcctgaggtggccggcgactgcgtgcgcaaacacaagatccgcaccccactccccgccactgcagctccgcggccgcgctcagagtctccggaacagaccggactcaatgcggaccaggcaagcggaagtgtgccgcttccttccggccagcgcagcacgagacgaggcggggaaccgcgggaggaggcggggcctagtgttgacgaacagctcccggggcctatgggcgcgggggcagccgcccggcctctccggcgcgccccctccccggggctgttgacgccccccagcccctcatttccacaaagctccgcggcggttctgccctccttgtacccgcggcgcgctgcggcccgtggcgcggccccgttcccgcctagccccgtcggcctccttcccctcccggagccgcgcgtgaggacggctgaggccgcaggtctgtggcggcgcgccgggacgcgcgggcgagggtctaccgagagggcgggcgggcgccggcggaaccctcggctacagccccgagcccctggggccgcccctccccgccgcgtggcgcagtcggggggcgcggccgcggcgtcggggcgtcgggaggggcggagcgcgggagtgtctgccgggacgcgggccgggctgggctccggaaggaccaagtttgcggagcggcttctgctcgtcggccgtgcggcgaggcagggcctgggctgcgaccccggcggccgctcgcggtcttgggagagctggggcgcgtgcctgaacttcccggctgcccctgtccttggagacctacctgatggggacgccaggtgtgcaggggcgtggcgcgtaggtaagcggacccggtgcctgcctcgtccaggggatgctcactagagcgctaggcttttttatttttattttttagagacaggggtctcgctgtctcgcccaggctggagtgcagtggcgttatcacggctcactgcaacctcgaactcttgggctcaagcgattctcccacctcagcctctggagtagctgggaccacaggcatgcaccaccgagcctggctattttattgtatagatagggtctcgctctgttccccaggctggtctcaaactcatggtctgaagtcatcctcctgcctcaacctcccaaagcgctgggattacatgagccgcctcgcccggctagcgctagtcgtccttattaataaagaatcgcttctggtcccttttcagttgtttacaatggcattccttttgatctgatggaggaactttttttcttagttcatgggactgttgcagtgcctgacacataattggtacttaaatatgtgttggttttctgccttaacatattagaatatatgaattgtttaaaaaagtcctctcacacttagggaggactctaggatgaggtcacatgggggataagcccatctgtggctgtaggactttgttaaacactcctcttctccctctctgttccagattctccatttccagtgcttgaaagcacagtacttaaatctggcttcctgcttttttttttttttttggtatgaatgaatacatgaattgtataatgttagttggtttgttctgtagagcaagttacccttaggaattaataaactgtggaaacaatcatgtcaggctactagtcacatttaagaaataattagtaagaggctgttcattattcagaggagtgaagcaagatgttctggaggactggaacccgcttactcactgccaccactcccccgcctcccacttgctgctgccaaaccaggctcctgctcccccccacccattactcccaccgacgctccctgggatagcagctgccctgattggcacacccccgcagtcatcaccactgaggcgtattcctgaagctgccagtgtgaattgttttatagaacactggtgttaaaattcaggtacctgagacaaaacaatattttaattcttcaaaatccggttgtcaacacatttactatggagtatctcccacgtggccacttctgtgggaggtactgaagacctactaccgcctatggaagtagaaaataatatacaactgtgtagttacgtgacgcattgcgtggtaactgctatggctcagggagggagaagatcagccggaactggaatgtcccaagatgttctggaagaaaagcagtggctcgtttgtgttgcttacctgtattcctgactcctggcagggcctgctgtagagcacatgcttcatgaataaatatgattgagttgaataaatatttgaattgtgttttgagtgtagctttgaaggccagcaacgatttagatggcaagatcgagggcaggctgggcacaatggctcattcatgtaatcctagcactttgggagtccaaggcggggaggatcgcatgaggccaggagttcagtaccagcctgggcaagatagggagaccccatctttacaaaaaataattagccaggtgtagtagcacatgcctgtagtccagatactcgggaggctgaggtggatcacctgagcctgtggaagtagaggctacagtgagccgtgatggtgccgctgcactccagcctgagtgacagtgagaccctgtcttggggggaagaaaaaaaaagggagggcatgctaatagagggaaaatggcataagtaaaggcatttcagcatggatgagcacggggtgtgttggggagaaggcactgacgttgatggcctgtttattgctatctaggagtgatttggagaacaatgcatgtaagtctgacatcatgatgtccatccggcaaagaagagaaataagagccacagaagtttctgaagactttccagcccaagaagaaaatgtgaagttggaaaataaattgccatctggtaggtgatttaaactaaagcagcaatttgggttgcttttatttctgcatattaaaatgtcactctccaataggataaaaatttggtgggacctaacaattgaaacttgttgtagtaccctgatattctaattgcaatttgattagattgattttacagttatgatttgacaaaagatgaaagagctttgattagaagtgtttgtcagctgtctgttcattaacttacggttcttccaatctcatcctttgactctctagagtaatggtccccccacccacaccccagattttagtctctctctaatttttctggtcgtgtatactatttacaccaggcaaccttaccttgggtgagtttccattaaggtagtgaaaggtggatcaacattttttaaaaattctttataattagtcaaattcctgaagttttcttttgcttttttttttttttcttttattggtgggaaaagtaatcagaacttggtcagttgtttgtataatggtaaagacttgctaagtgatgcatcagatagcattaattaccaacttcttgcttcctgagtagcttttgtaactaaagcatggtcaggattttaaaagttaacatgaaaatcttcatacccattaaccattttggatatctgacagaatttacattatttacagccatgttaattcttaccagccaggctagtaaagcaattcagggaaacagtttaacaaaagtaatctgtaatgggaggtcatgacacctggctcagccattagcgagtgattaacacgttttggataatagtactttctgaacaccttaaacaatgcaaagaaaaagaaatatactcccatcctgaaactaacaccagtggcactgtcttgctgtcttaatgtcatattctgcacatgtatacccataagcattcgtatacagttttgcaaaattgggatccacgtgctgttttgtagcttgctatttttctcttattatgttatgaacatgtcataagccagttaacgtatttttgaaatatcatctatgtaaagtatttttatagctgccactgtagaagtgaaaggttttcttaccatttgctaatacagacagaactgtgatcaatttccttgtggccatatgtttgtttaaaactttatttccttggggcatgtcttagtccatttctgttgctataaaggaatacttgaggctaggtgatttataaagaaaagaggtttctttgcctcagggttctgcagactgtatgagaagcatggcaccagcatctgcctctagtgagacctcaggaagcttccagtcgtggcagaagacttaggggagccagtgtgtagagatcacatgaccagagtagaagcaatttccagggaacacaggatgtcaggctcttttttaaccaaccagctcccctaggactaacagaatgaaaactcagtactgctagaatctcaccaacctgtttataagggctctggttccatcaccacaccacctcccattaggccccacctccaacattgggaatcacatttcatcatgagatttggaggggccgaatagtcaaaccacagcagggtacatgcctagattgggaattactggccaaatgggatgctcattttggtggcttttactcactgctgccatgttgcattccagagaggcaccaatttattcttctagcagcaatgtttgaagatgtctattttttatacccttaccaaaacagtattagcattttgaaagctgtcaaattggccaagatttaagtataactcacagttttgatttgcatttctttaacattaatgaatttaaacatcttcagtctgttattattattggccacttttttctattgtacattgcctgttcatgtccttaatctttttcctactgcagtattcatcttgacaggacaataaattgtcctgaaataaaataaattgtcctgaaagtattcatcttatgttaagggtatttaagctttcttatatgtgctatccatattttgcctagtttatatgtcctttaacttgagttatgttggattatttattctgtgggtttttccccccagagcattcctgcaaaacctgtgggtttaaaaaaaaagttttaggtaatcggccaggtgcagtggctcatgcccgtaatcccagcactttaggatcccagcttgggtgggtgaatcacttgaggtcaggagttcaagaccagcctggccaacatggtgaaaccctgtatctactaaaaatacaaaaattagccaggcatggtggcatgtgcctgtagtcccagctactcaggaggctgaggtgggagaattgcttgaacctaggaggcagaggttgcagtgaaccgagattgcactactgcattccatcttgggcaacagaacaagatcctgtctcaaaaaacaataattattttttaggtaatcaagtttttaaaatagcttttaaagaataagccaccaattgtacctagattatctaaaagatcgattacgtcctagacacgtaacacatttagtcatccatttaacagacttcatagttaaattacggttgttaaactgtgccggacagaggccctcagtattaaacatgaataagataatgtatttgtcttcaagaagctcacgttgtagttggcagaatggacacatggacagttagatacggggtaacagttgtaatagaatgaaaacaggtctgtggaatcagaaaggaccctccgctggagacaggaaaagctttcccagtgacaggcagctagacttagcttacttgataatctgaagtagaactattacattctgatttttttactgacttagttatttatctgttccatttttccaaaaggttgtaccagtagaagattatggaagattttgtcattgacaattggtggaaccattgccctttgcattggacttcttacatctgtctaccttgccacgttacatgaaaatgatttatggttttctaatattaaggtatggagtttctttgaccattgtatcattcactcagtgggatctccagtagtaagccatgtggatgaatgaccaaggcaacacagttttgccataaagaatccaatctctagaaaggttggactatagagtgaaataacttttgtgtttattattttaaaataacatattagaatctttttttaaatttttctttattatttatttatttttgagatggagtctcactctgtcacccaggctggagtgcggtggcgcaatcttggctcactacaacctctgcctcgcaggttcaggtgattcttctggcttagcctcccaagtagctgggactataggtgcgtgccaccacacccagctaatttttgtatttttactagagacggggtttcagcatattgaccaggctgatctcgaactcctgaccttgtgatctgcctgtctcagcctcccaaagtgctgggattacaggcgtgagccactgcgtccagccagaatctttatttttcattttaattttttgagatagggtattgctctgtcacccaggctagaatgcagtggtgcaaacatgggtcactgcagcctcaacctcctgggctcaagtgagtatcctgcctaagcttcctgtgtcactgggaccccaggcatgcaccacctcaccaagctaaatttgatttttttgtagagacagggtctcactttgttgcccatgctggtctcgaactcctgggctcaagcgatcctactgccctggtcttccaaaatatgagaatgagccatagcacccagcccagaatttttataatcaagtgagttttttctttttcattaacttattccatttatttagcagttattctaaattagtatttttcaagttatagattgtgaaattagtgcagtaggtcatgagtaacatttttcttaatgaaatcaaaaagaaagaatactatcacatctagtagggttgaggattgttttgtgaaacttttaattttatatatatatatatatgcacaaactgggtcacagtatacaaggtacttccttttcttttttttcttgttggctacaacaggaaaaaaaaaaaacagaaaaggaaataaaaaagccactgctttaaatcatggggtctaaatgtggctccacagagggtcctcagcatgttcatgactatctaatactctgtgcaagtggttttgcagggcatagggcgatggggaagccatatgtttccagggaaaggaactgtaattttaatcagattttcaggagggttagccgggcgtcacgcctgtaatcccagcactttgggaggtcgaggcgggcagatcacttgaagtcaggagttcaagaccagcctggccaacatggtggaaccctatctctactaaaaatacaaaaattagccgggcatggtgacacacacctgtaatctcagctactcaggaggctgaggcacaagaatcacttgaactcgggaggaagaggttgcagtgagctgagatcccaccactgcactccagcctgggcaacagagcaatactctttatcaaaaaaaaaaagaaaaaagttgagggggtggtctgtgactctttaaacacgtttccttgttttctttctctctctctttttcaacatttctagaactcctcttggcattgttttcagaactcgtatataacttacatgtggaaatttgcatccaaatataccttacattttaatctaatatgtcatgatctttaacctaaactgtggtgtctaatgactagttgcttgtaaaaataaacaaacaccttcaaagccaaagatgtgtatctataagaatgttcgaaagaagtgactgatgaaggatctgaagacattttccaaagaaagttttccaaaacattttgagctttgattctcttactgaaatgagcctcgaaaggatattactttgatgacaaatctaatttataagaatgacctctagtgtgtttatttttaaaacttgctgtgttactttatgggtacagtatatatatctttatacaaattatcatagtaccaaagaagaataattctttttttttttaattattattatactttaagttttagggtacatgtgcacaatgtgcaggttagttacatatgtatacatgtgccatgctggtgcgctgcacccactaactcgtcatctagcattaggtatatctccctatgctatccctccccctccccccaccccacaacagtccccagagtgtgatgttcccctcaaagaagaataatacttatctttcagtgacagtaggtagttcttcttgtcagaagaattttactcgtttatatatctttttttgggaggagcgggggcgggcagggtctttctctgtccccaggctggagtgcaatggcacaattacagctcgctgcagcccccaaactctgggctgaattgaagcattactctcaccttagcctcccgagtagctgggaccacaggtgcacgtcactgttcccagctaattatttaattttttgtagagatgggcctactatgttgcccaggctgttctcaaactcctggactcaagcaatcctcctgcgttggcctcccaaaatattgggattataggtgtgagccgctatgcccacctatctctttaaaatggagtgctggcagggcgtggtggatcacttgaggtcaggagtttgagaccagcctggccaacatggtgaaaccccgtctctactaaagatacaaaagaagagggccgggcgcagtggctcacacctttaatgcccgcactttgggaggccgtggcgggcggatcacgaggttaggaaattgagaccatcctggctaacacggtgaaatcccgtctgtactaaaaatacaaaaaaattacccgggcatggtggcgggcacctgtagtcccagctactcgggaggctgaggcaagagaatggcgtgaacctgggaggcggagcttgcagtgagccgtgatcgcaccactgcactccagcctgggtgacagactctgtctccaaaaaaaaaaaacaaacaaacaaaagaaattagccaggcatggtggcacatgcctgtatttccagctactcaggaggctgaggcaggagaattgcttgaactcaggaggcagaggttgcagtgagctgagatcatgccactgcactccagcctgggtgacaaagtgagatttcatctcaaaaaaaaaaaaagaaagcttgtaaagcgattccctagaattaaaccatgtagtgcgtatatattaacataagtattttgaaaaaaggctgaaatatctctgtgtgagcagatagcccaaattgaatgctaacaaccgtatagcaaggagacatgttgaaagagatcatataacttaattataaactattaagtgtagctctttaatttaaaacttgtaaccagccttcctactttccttaaataaatacaccccatcatcaagaaacttgaacacccttggtttttctctctttactttcactgggttaaggaagttctagttttacctagtatttactgagcacctgttctgtgggtaacattgagttcaacactgcagagaacatggaaggaataacaaagatttctgaatttaccagcagattttccagtatagtaagtgaattgagtaaatatatattaagcacctacagtatgccagcaggcactgtgcttagtggtagcagtatcactgagtaagataaggccatgcccccaaggaacttacactcttgagaaggatacaggtcagtatccagacaattacaggacatcccaactcggtgctaggatggggtgagatagagagcactgtgggagcacataggagtggaagcctaacctcattttggaagatcagggaggcttttctagaggaaatgatggttaagtagacctgaaggatgagtaagagttaaccaggcaagttggggaggaaagatgagtgtcctagaagagggacaagtgcaggaaattcaagacgcaagagagcctggtgtgtgaagcgttggcagtagttcagcctggctagagagtacaaggggagaggggatgtactgggaatggtaaacagaggccagataataaagggtctgtcttctctgtctcaaagatagaactctctctgaatgtattatagtagtgaaccctatttttagtagaggcagcgatgtcatcgtattggcgtttcagaaagttgccttaggctgtgatgtggaaaatggatttggggagagcaaaactaaagtcaggaaactgctaagataatccaattcagtggattcagtaatatttaaatattgcattcaaatattcagtgagtatcttctgtatgccagacacttttctaggccctgggaataaagcattgaatacgacatagaacttaattatgatgaaaaggggaaaaatcagaaagaaaatgaaaatgaatcctacggtgaaagtcacacgggatgatgagatagtcactagaaggctacttggaattgggaagtaaagccgaccactttgaggacatgtaaaccaaaacctacatgatattatagaaggaaccagccaagctaagatctgcgagaacattctaggcagaggaaacagcaagccaaaagtctctaaggtaggaatgaacttggcaaatccaggatcagagagaaggtgcatgtggccagagttttatgagtgatgaggagaaggtagaagagaggagaagaacagatcacttagggctttgaggctgcataagagttgcagagtcgtgaacagagtcagagctttttaggaagtggacttggaaggatgtcttgattcattgtgtggaagtctgttgagagagaacagttgagaggctgtcagtccaagctgcttgctctccttagcagcggggtggatggatggacatgccattttctgtgacaacgagcaccgggaggagcagagctggaggatcagtaagttctgacaccagctatccaccgttaggccaaaccccacaggatgagggcacagctctctacaaaaatgccttcgtttcacacaccagtggcacgtttggggcccccccaggcaaccctcacttctgaccagctggctacaaattctgaggttcccaccacccactcaggttcaataattcactagaacaactgacagaattcagggaagtgctatattatgactacagatttattatagcaaaagattacaaatcagaacgagccaaagggagtgacacatgcagccaagtcttcgagggtcccattggaagctttcattatcttttccccatggagtcaggcctgttaccctcctggcacatcactgtgttacactatgtggagccaaccaaagaagctcttctgagtactggtgtctagtttttattgaggtttcgttatgtaggcatgattgattggattattgcccacaaggctggactcaatctccagcccttttctgctccttagaagttgggctgctagcacatggctcaaagccctgactctcaggccacatggttgagtgttctggcttggccagccccaatcctgagtcatctccttagcacaaattaggagctcaccctgtcacctgctagcccaggctttcagatgaggtctgaagaacctaccatgaataacaaagacactctcatcacttagaagttccaaggatttagaggctatctcccaggaactggggacaaagagcagccagattctttattcttagagggtagagttttgatatggtttggctgtgtccccacccaaatctcatctttaattgtagttcccataattcccacatgttgtgggagggacccagtgggaggtaattgaatcatgggggcgggcctttcctgtgctgttctcatgatagtgtcacgagatctgatggctttatttattttaatttttttctgagacggagtctcgctctgtcgtccagactggagtgcagtggcacgatctcagctcactgcagcctccgcctcctgagttcaagcaattctcctgcctcagccacctgagtagctgagcttaacaggtgcgtgccaccacgcctggctaatttttgtatttttagtagagatgggatttcaccatgttggtcaggctgatcttgaactcctgaccttgtgatctgcccaccttggcctcccaaagtgctggaattacaggtgtgagctaccacgcctggccagatctgatggttttatagaggggagttccccgtcacacactgtctgcctgccgccatgtaagacttaactttgctcctcattcactttctgccatgattgtgagacctctccacccttgtggaactgtgactccattaaacctctttcctttataaattacccagtcttgggtatgtctttattagaagcatgaggaatggactaatacaaggttacctccccgtaaccagggacagaggtcagccaaattctttcttgcacaggaggaaaggcagggaacaatgagctcaggtttgactatgttgtgaggcacttttaaagcagtccacctagaaatacagaataaaggaagctagacttacggggctgaaggcaggagttccgtctgtgttggaaatgggcattttcatcttaccatcttgtagatgtgtgggtgagattgtttcaggagcgtgtaaaatgagaaaggaaagagaacctgggccagtttgtgtctgtgcctcagataccatctgggaagctataaaacaggcgcttttccccacccaccacccttgtcctctgaaacttacaattgagctcagagtcgtatccatttttttcctctttgttcaagcagtagtccatagcacacattttgggttgtctcctatatcacaagaagaatcctccaatgttagaaccatttctcaaacctgttaatacctctgcctaggcatttggttttgtgttttgcttagattcgctagatcagcattgtccaataggactataatgaaggaaatgttcagtgtatgcactgtctagtacagtggccacatgtggctattgaacacttgaaatggggtagtacactcgggaactaaatttttttttaattaatctgatttaatttttaaatatgtacatattttctgtaaataaacaattagaaattataaatatcactgaacaaagaccttatttggccaaagaaaagctcatttttggagtgtatattcctttataaatctcctgtaatttataccatttctatattggggaattatttgagaagagtaaatctgctttcctttcctgttttggggttataactttttctcatcaaaattggtaggttagtgtttaatgaaaatactttgattttatttttgaatactttgaagtagttgtaattattcagagagtaaaagtattggttatgtaatagacaagtcatacactgaatttatgcattcaaaatgattttttaaatgtttgttgtattgtttgtatatgaaaagtgggaaccctgaaatagcaactggaaagttgaaggaaaagatactggtttcatatagtagtataaaagatatatctagtatcctttctcagcatatttttaaaattttaagttatttttctattgtcttcattgtattatatttcccttgctaggaaattgaaagtattcaagattttttaaaataccctttattgaatgtctgttacatgcttggaactatttgggggcattttaatacatattgtatttatttgtacctttttttttttttttgagacagagtctcgctgtgtcgcccaggctggagtgcagtggcgcgatctcggctccctgcaagctccacctcccgggttcgcgccattctcctgcctcagcctcctgagtagctgggactacaggtgcccgctgccacgcctggctaattttttgtattttttagtagagacggagtttcacagtgttagccaggatggtctgggtctcctgacctcgtgatccacccgcctcggcctcccaaagtgcagggattacaggcatgagccaccgtgcccggcctatttgtacctattttttgagacaggttctcactctttcactcaggctggagtgcagtggtgcaatcaaggtcactgcaaccttgaactcctgggctcaagcagtccaccaacctcagcctcccaagtggtgccagctaattttttcattttttgtagagacagagtctcactttgttgtacaggctgttcttgaactcttggcctcaagcaagcctcccacctgggcctcccaaagttctgggattatagacatgagccacaatgcctgacctacatattctgtttaagctgcctatcttcagagcccaaacactaactctaaattgtcctttcaatgcaacctacttttttactgccctttattgtaaacaaaaagtaaaaggcactcccccattttttttttttttttttttttgagacggagccttgctgtgtcacccaggctggagtgcagaggcacaattttggctcactgcaacctccgcatcccagattcacacggttctcctgcctcagcctcccgagtaactgggattacaggcaggcaccaccacgcccggctaatttttgtatttttagtggagacggggtttcaccatcttggccaggatggtctcgatctcttgacctcatgatccgcccgcctcagcctcccaaagtgctgggattacaggcatgaaccaccacacccagctagtaaaagcctgttttcttacttggtgttctgcccttatggtgcctggcacgtcatcagtgctaagtagcttccagtcttctgcaatagagtcaactgctggggctgaggggtatggggtaggcagaggaaaaggggaggcactggctgctgtgaagaatctggatgggaactagaaccaaaggacatgacttccggagcttgccttcaaggatacgatatggttagtcatggcaggtacaggagccagtggatgcattttaagtgatttttgtttagtagttttgtttttttttgttgttgttgttgagatggagtctcactgtcgcccaggctggggtacagtagtgtagtcttggctcactgcaacctttgcctcccgagttcaagcgattctcctgcctcagcctcctgagtagagtagctgggattataggtgcgcaccaccgtgcccagctaacttttgtatttttagtagagacgaggttttgccatgttggtcaggctgttctcaaactcctgacctcaggtgttccgcccatctctgcctcccaaagtgctgggattacaagcatgagccaccgcggcctgccatgtgtttaataaattgtatagtagacatctgtatagtcttcatttttagtttttgagtgtgtattgttttttaattattgaaactatgttgtaacaatgatgaaaaattttaaatgaaaaacattacttaatattcattacccttaacaaaaagcagttttcatttttcccttccattcttcatcctaagtgcctaaatattttacttatttatgaccccattatagttagtttttataatctaccttatctgctgttacatactatgctttttccatatatacattttcacaaaacttttataattatgtaagtagttatggttttataatttcatatttttgaagtttttattctcttgattattccactatttccatgctcccaactttggatagttagattgtttataatagtacagttaaatcctaacagtgcttacttattctcactttaaagtggcaatgtagtggtatcagttccttctttcttggaattccctcagagcaattaaggaatgtgaaaaatagataatcaagttccagctttgatgaagggggctgccaaatccagtggcactcagaaagatgctgagagaagagtctgcggccaggcaaggtggctcacgcctgtaatcccagcactttgggaggccgaggtgggcacatcacttgagtccaggagttcaagaccagcctggccaacatggcaaaaccctgtctctactaaaaatacaaaaattagccaggtgtggtggtctactcctgtaatcccagctgaagcaggagaatcgcttgaacctgggaggaggaggttgcagtgagtcgagattgcaccactgcactccagcctgggtgacaaagcgagacttcatctcaaaaaaaaaaaaaaaaaaagagagaggagtctgtaagctgcaggggtcagataaagtgagtaaagtgtcgtcctccaaagttagtggcatctcctaaggggtaaaaccaacagcaccctgagtaggaccatgggatgggtgtgcaggcagtagtggcagccgctatcttggatccactctgctatgaagaacagcatgctaggcaggccagaaggagcgatcacagagacaagccatatttgttaagagatggaatttaagaggacaggaatgaagggaggcaacctgcatttcgaagatccccaaagctatcaagttctgttgactaaaatgaggaaaagactgaagaactcacccttgtaaaccaccctatacaatgaaaattcttgctgacctgagctgtgtgcctggcctcacccccacatgaacttcctgcaagtagcttgtgtagtaagaacttgccacattctgacataactgataaggaaggaactgggacaagattgtccggtgatactgcaacaaaaaagggaagagaacaacaagcagacatcattggtgaagaacagtcaccagaataattttacagtggagatgtggaggttgtaaccacacgtgtcacattaaaagataatcctttgccactgtggaagatgaatacaaagcagaaacataagaaggtatgtgccttcttcaaggggaaacaggaagagaacaaaaggaagtgaaatatgaactggcagactttagacaagaaatagaattacaaagtagaatcattatagaaattatgaccgtctcagatgcaacatacaggagactggaatccgtagaatgtacagaaagagcaatgttggacaggactgagagaggtcaacaaaatgaaaggagattgaataaagtgacagtatgagaaagcaagtgacaattgaggacaaagagcagcaagcatgcatcatttgtgtcccaaaaaaagagaacgagaacaataaatcaggaaaaacacacacacacacacacacacacacacacacgtttaaagatgtaattcaaggaaactttccaaaagtaaaaggaaatttgaatctactaattgaaggggcagagcagtttccaggataaattggcctagaaaaatcattagcaggatagagttctctgaagttgctgaacttaaatatgtaaagaaacctttggacattctagacgaaaagatcaagttaccaataaggagaaacaaaagtcaacctagcattcagtttctccacagtaatgtctaatggtcaaagaccatgaatgatgcctagaaaatgctcaagtaaaagaaagtgatttacacattttaacccagtcattccattgcatataaagatggcatacaaacttttttgttcctagaaatatgtacttttaagaatacctgaagaaattggaagaggaaaaacttcatccatccatgagatacatggaaaaacaatgacagaaagatgctcagtggggctcaaatttatttaactataggactaaaactaaaaattagtgatagaacaaaatgtgtatgatataaataatgttatattaggtacaaaagtaatgtaggtcttgtcattaattttatttatttatttatgaaacagagctcgctctgtcgcctaggctggaatgaagtggcgtgatcttggctcactgcaacctccgccttctgggttcaagcagttgtgcctcagcctccccagtacttgggattataggcatgcaccaccatgcccagctaattttttttttttttttttggtatttttagtagagacagggttttgccatgtcaggctgttcgagacatgccaggctggtctcgaactcctgagctcaggcagtccatccacttctgcctcccaaagttaggattacaggtgtgagccaccatgcctggccgccattacttttaaatggcaaaaaccacaattacttttgcaccagtctaatacacaagaatgccaacataagtaataatgttataatgcataataataacataacagtgtaatacgtataacacaagataaaagaagaaggggaagagagggtaaaagatggtggaggctgactgggcacagtggctcatgcctgtcatcccagcattttgggaggccaaggcggcaggatcgcttgagctcagtagttcaagacaagcctgggcaacatggtgaaaccccatctctaaaaacaaaaacaatttgccaggcatggtggcatgtgcctatagtcccacctactcgggagactgaggtaggaggatcacttgagctcaggacacagaagttatcattagctaagattgtgccattggcctccagcctgggtgacagaatgagaccatctcgaaaaaaaaaaggttggggaggccagctggcacagtggctcacagctgtcgtctcagcactctggagggcaaaaggtgggaggattgcttgagcccagaagttcaagaccagcctgggcaacatagtgagatcccatctctacaaaaaatttttaaaaaattagctgggtgtggtagtgtgcacctgcagccccagttacttgggaagctgaggcaggagggtcacctgagctggggaggtcaaggctgcagtgagctgtgatcacaccactgcactccggtctgggcaacagagtgagaccctgtctctaaaaaaaaaaaagaaataaataaaaaaaaatggatgggagtatcctgatttctttctcttttataactggaagtcagaaagtttgatttaaaactgataagacacacaagcctgggcaacatggtgaaaacttgtctctactaaaaatacaaaaaaaaaaattagccaggcttggtggcacacagcttacacccagctgcttgagagggtgcaatgggatgatcacctgagctcaggaagccaagtcttcagtgagccaagatcatgccgttgtgctccagcctgggcaacagagcaagaacctgtctcaaaaacaaaaaaaggtctctgtagatcttcaagttgacctacagagtcaacatgatccctctcagaatcccaggtggacttttcacagaaattgacaagctagtcctaaaatgtatatggaaactcaagggactcagaatagctaaaacagttttgaaaaagaagaacaaagttgtaagactcaaactttctgacttcaaaacttactatacagccacagtaatcaagactctgatgctggcataaggatagacatataaatcaatggaataaaattgggaatacagacataaatccttagatggtcaagtgattttcagcagggcaccaggaaggacagttacgtggagaaagaatagtcttcaataaatggtctataaacaaatggatattcacatgcaaaagaatgaaattagaccactgcctcacaccatacacaaaaattaactcaagatggatcataggcctaaatgtctaaaactataaaacatttagaagaaaatatgcaaatgaatcttttataactgtggagtaggccaaaacttcatagagaccacactaaaaacacatgattaaaaataaataaataaattggtgttcatcaaaattagacatttttgtactccaaagtacaccatcagaccaggtgctgtggctcatgcctgtaatctcagcagtttggaggccaaggcaggcagatcacttgaggtcaggagttcaagaccagccgggccaaaatagtaaaaccctgtatctattaaaaatacaaaaattagccaggcgtgatggcacacatctgtagtcccagctactagggaggctgagacagaaggatcacttgaacccgggaggcagaggttgcagtgagctgagatggcgccactgtgctccatcgtgggtaacagagcgagactctgtctcaaaaaaaaaaaagaaaaaaattaagactcaaaagtcaaaattattccttgatccatgggctgtagaatagattttgtgttagcaggcatgaaaataacacagataaccagatgcattatcaatgagcagtagtattttgaaaagaattttttttttctgtgtagtagatctcaacagtgggcctaaaatagtaaatcgtgctgtcaacacatgggctgtcatccaggttttgttgtccatctttagtgcacaagcagagtagatttcacatcattcttaataaggaccctaggattttcagaatggtaagtgaacattggcttcaacttaaagccaccagctgtattagcccctaacgagagtcagcctatgctctgaagctttgaagtcaggcattgacttctcctgagctgtaaaagtccgagatggcatcttcttccaatagaaggctgtttcatctacattgagtatctgttgtttaatgtaggcaccttcatcagggatcttagctggatcttctggatgacttgctgcagcttttccatcagcactttcagcttcaccttgcacttgtatgttagggagatggctacttcccctcaacctcatgaaccaacctctgctagcttccagcttttcttctgcagcttcctcacctctctagccttcacagaattgaagagagggccttgctctggattaggcgttggcttaagagaatgttttagatgatttgattttccatcagagcattagactttccccgtatcagcaatgaggctgtttttcattcttatcattggtgcgttcactggagtagcacttttaatttccttccgtaacttttcctttgtgttaacaacttggctctttggcacaggaggcctagtttttggtctctctcaactttcgacatgctttcctcactaacttatcatctctagctttccatttaaagtgagagatgtgccacacttcctttcgacgcttagaggctattgtaaagttattaattccgatattattgtgtctcagggagcagagaggcctggggagaggaaatgagacagaagaatgacagagctgtcagaacacacacatttcagttcaccgtcttacatgggtgtggtttattgtgccccaaaacagttacagtagtattaataacatcaaagatcactgatcccagatcccgtgacaggtataataataaagaaaaatgtgaaatattggaagaattactaaaatgtgacagagacaaaaagtgagcaatagctgttgcagaaatggtgttgatagttgtttgatgcatagttgccactaagtttcaatttgtaaaaatgcattatctgcaaagggcgggaaagtgaggcacagtgagatgaggcgtgcctgaagtcgtttccctttgtttacaatgtgttctttctttggtgtttcgttgtttgtttgtttgtttttgaggcaggatcttgctctgtctcccagtctggagtgcagaggtgcgatctcggctcactgtagcctcgacttcctgagctcaggtgattctcccactgcaacccctcaagtagctggaactacaggggcataccaccatgcccagctaattttttatatttttagtacagcctgggtcttgccatgttgcctaggctggtcttaaagtcctgggcttaagtaatccacctacctcggccttctaaagtgctggggttataagcgtgagccaccgcacccccgcattcttctttcttgttggaacataaacatctttcggtcaaatactaaattcttgcacctttttgtttccccagcaaataaatatgcaatgataaggaaggcagttctcctttggctataagcaccaacatcactctttctttttagtcttttttccttgtgctaacattttccactgttattcttatttacttgatattgccgaatttgcatgtcttcccattgaatactcctgcaaagcaaggagactttagaatagataggggtaatccacacaatagtagtacggtagtgctaagactgctgattgcctgagtgtgggcccagtggaagaactgtcacttcagtagcagactgccctcctcacaagccctgcttggcacttctcacatgccacggctttaatcaactctggggcaagaatcattcccctctaacagatggacatgaatttaaccagacaataaaccatgtatgtgccataaatatgtttgctgagggcatgattcccagtacagaactttaagaacagctgtcttatgggctactatttcttggtgagatgatttgttaacctaattctgaaacagattacatttataaagttaatttttcggtggcttccccactactagcagtctaattattttgggggacaatttttgtaaacaaatctttttttttttttttttttttgagacagagtttcactccatcacccaggctggagtgcagtgccgggatctcagctgactgcaacttccacctcccggattcaagcaattctcatgcctcagcctcccaagtagctggaattacagacatgcaccacaatgcccagctaatttttgtatttttagtaaagacggggtttcgccatgttggccaggctcgtctcaaactcctgacctcaggtgatctgcccacctcggcttcccaaagtgttggggttacaggtgtgagccaccgcgcctggcctgtaaacagaacttttttacgtgagttgttcttgtttttttaaacatgagttgttttgttttttttaaaaaaaagcaagaggagaaagacttcaggaccattgcgatagatgtagggaccactgcaatgaggtcttgcagtggtggagagagattgtactcaacttctagtacatcatgggtgagtaggaataggcagccaaggagcggattggggtcagtggctgggaaatgagtaagaggaaccactgggatgcgggggatcctggctcaaccaggcttagagggttcttgctaaaggcaggccagagtgaccagacattatgtgggggatctatttacgtgagatttttaaaaagctaatttgatgtttcctttccaaatttggtgtcatttgtctcaaaggactctagccttttgggcattgccagcaacttgtctgagtgcctgtggggaatgtgatcatttattgtgagcagtcattttttgtgtgtgtgtacatctattaaattgctatatacactgttacttcaatggttttagctgtacagttttttttttgttttttttcttgttgttgttgtttgtttgttttgagacggagtctcactctgtctcccaggctggagtgcagtggtgcgatctcagctcactgcaacctctgccctccgagttcaagtgattctcctgcctcagcctcctgagtagctgggattacaggcgcctgccaccgcgcttggctaattttttgtatttttagtagagacggggtttcaccatcttggccaggctggtcgtgaactcctgacctcaggatccacccgcctcagcctcccaaagtgctgggattacaggcgtgagccaccacacccggccagctgtacagttctttataaatacaagtcttttgtctttccacttctttctgtcattatcttcgaagatgttttcgttctgtcaacattgcattccccatggaacctgtgcaaattgaatatgaagtatttgttcgttttgcattctttagaggataactactattggtgtatattttcacgggtgtgatctaccaagcgaagtataaattgctgtaaaactggaaaagtgtttgaatgagtgaagcagatgttctcttagcatgaagcagatgtaaaacttgcaagtgtctgtctaataaagtatagcatttggttctgtacagctggtgctagattaccaattaatcatgtttgaatgcatttttactaattaggtccccctctgttctttgtgcattctggctataataaagggagagatgggacacaaaagctttctacctttagtactttgagcagtgttttttcttattccctggtcttttattcttagaaccatataattcactctttcattctttattggctctccagtttgatttgggatgtaggtgtgacaggattttcacactcctcaagtgcctttgaacactttaaggaagctagagaaaagaaaaataatgtaattaatgttgttgttgttgttcttaatttgcatggacaaaagctagtatttgctcagttaacatcaattcatagcctctgtggttatttgaatgagtaggagtttggacattctagaaacgagtgataccaggttggttttaagttctcaaaagcaatagagcacgttttctcaaagataaaaaatgagtggattaaagtaactacccagaagagttgcctttactgctatgaaagatacaacacaaatcactagcaatgaaagtttaaaaagctgtatcattatgtagtagcctttttataacgcaagtgtgttattgaaattaaattttaggcccaggcactgtggcttctgtctgtaatcccagcactttgggaggccacggcaggaggatcacttaagctcaggagttcaagaccagcctgggcaacatggcaaaaccctacctctacaaaaaatacagaaattaggtggacatagtggcatgtgcctgtaatcccagctacttggaagccgagaggatcacttgaccctgacacgcaaaggctacgatgagccgtgatcatgccaccgtactcagcctgggtgacagagtgagaccctgtctccaaaaaaaaataaataaatttcagaacctgatgggcctttttttaaatgcttgatttccccaggataaattggttttctgtgaaaggaagttcaatatataagatttgctaccctacctcccatttttctaaaaggaattaacaaacaatgataaaaagatttagagggtagcagaaatatattaaataaataatttctaagtctgaagataatagcatgaatggttctttcttatttatttatttatttattttttgaggcagggtctcgctctatcatccaggctggagtggcttgatcatggctcacagcagcctcagcctcccagtaggctgagtctcaatcgatcccccttcctcaacctccccagttgctgggagttcaggtgcatgccactatgcctggctactttttttttttttttttgtagagacagggttttgccatgttgcccaggctggtcttgaactcctgagctcaagcaatccacccacttcagcctcccaaagtgcatggctataggcatgagccaccgcacccagcctgagtggttcttttaatgagatgtttattaccatttgaaaattagttggagttagggggaagcaaaatgagctaaaagaagttcatcagctagaaaatgagatgttcagtatttatcactttcccccattgggtttgtggaatgtgaatctgctataatatgaaaaagcatggccgggtgcagtggctcacgcctgtaatcccagcactttgggaggccgaggcagatggatcacctgaggtcgggagttcaagaccagccttaccaacatggagaaaccccatctctactaaaaataccaaattagccgggcatggtgcacatgcctgtaatcccagctactagggaggctgaggcaggacaatcgcttgaacctggaagttggaggttgcagtgagccgagatcgcaccattgcactccagcctgggcaacgagtgaaactccgtctcaaaaaaaaaaaacagatcgaattatattttagacagtgtgttacagattttaggacatggtttgttttgttttgtttttaacactggtgtaaaagaatctctaataacatagattataactttttatttatttatacttttacaggtacaggttaagtatccctcatctgaaatacttggggccagaagtgtcttggatttcagattttggattatttgcatatatataatgagaaatcttggggataggattcaggtgtaaagatgaaattcatttatgttttatgtataccttatgcacatagcctgaaggtgattttatacaatatagttcataaaacaaagtttgtagacactgaaccatcagaaaacaaaggtgtcactatctcaaccatcccagtggacagtctatggttatttggcatcaccattgttcctgactctgaatttacatggtgcctttataagtaatcattttgttatacttattcgtacataagtacttaacaataaaaaatatgacataccatcaatacggtgaaaaaaataacactttcagggtaacttgtgtcatcgtgttggctctcagaaggtatccaattttaaagtatttcatttggatttcagcttttcaggttagggctgctcaacctataaataaagtgtatcatctaacagtattaattggattattccagaaagtcttccgtgtcattgttgcccattgcttctgttttatagtaataatttaaatttaataaaagtatcttgtaactaaattggctaatagctatttaagttttcagttcttctagggttgaatacttatctaaaagcagtttaaatatttcatgtatccatttacctgcataaacctcttcccaccagggttacgcttgtcagagtaaaattcatgtgtctgccttatttgactacaaataccttttattcttagaataaaatgaaaatgattgatcttatgtaatattggtagcttttaggtaggtgtctaatgcaattatatttcttttcatttttttttgtgccatccctgttttgtgtctcactgctattacataggaatggtgatgtattctttaaaattttttttaagattaaacattcactaaagtagagaatagtaggacagactcccatgtatccctcactcagctttaacagtgatcagccttccattcttgtttgccaagattttttgagactatattttcagagttttttctctttcaagttgcagttatgtatcctttctacagtaacaatatgtatttaaacaaaactaggtcacataaacccataggatctaactctgttttaggaagtggagcgagaaatctcattcagaacagagtgtggcctgtattactcctactacaagcagatgctgcaggctccaaccctcgtgcaaggtaattacaactgatagtttcatttggggtctcctgcatttttttcaatattttagtgagaagtactgtgcactaaaaaccacttaaatgctctctagaacatgtgtatttttccgtgctaatgtctaatcatttcatgaaaatgttttttgctctggaagaagttatgtaatactttatataaccctcctctctttgccttccagctctgttccatcccaaaagtaatatctttgcaatttcatggttttgttgctgaattttctcatgatcattttggaggaggtctttgcaggtgaaaggagtattgtctgagaacaggaggcattttggtaacacaaatgaaaattacagttgtgcctcttgtccccagtgctccattcattcctttatttcacagttgccattttcctgcatttttacttcccctaagtgggttagaccccacactctgcctttactccatctaatgaaagccccaacatggatctcttctacctagtacatacttgatcggcttagcatgagtgcatgtgacagaaaactgctcttttataggctttatttggagtcagctttgacatttttggtggcagttattcataaattatttttttgctgttgtttttgagacagggtctcactctgtcgtccaggctggagtgcagtgatatgatcatagctcgctgtagtctcaatctcccagcctcaagcagtcctcctgcctcagcctctcaagtagctgggactatgggtgtgcactaccacgttcattttttgttttgttttgtttctctgtggagacgaagtctcactgtgttgcccaggctggtctcaaactcctgagctcaagtgatcctcctgcctcagcctcccagtgtgttggaattataggcatgagccaccgcgcccagcccataagtgatgttttttacttgtagttttatcacctaggagacatgacattttggttatctttggttttgtgccataaaaattaatgagttggtccctgtgatgatagccagattcatccataataagggtaattaatcaccagcccttcgcttagtggttttagcagccattgatgattatcgtctgtagttcttatttcagaggggatgcaaattagtgaccttctaattctgtcattcctccttatttattagttggaactatgttatatagaaaaccttctcgttaattgtttggctaccttgcagtacagtttatacaagaaaagcaggcttagtattcattttttccccatacaatcaaaccttgttattcacagattccatagttgcaaaatcttttacttcctaaaatgtacttataaccctaaaatcagcattaatagtactttcacagtcattcatggacacgtccagagcaacagaatactttagcctctggcatgcgtgtttcccacagagactgaatgaggcgacactctgcctccttgtctcggctctcacactgcagtgtccttttcagaaagtctgttttatgccatgtcctttgcattgttttgctgtttgttgaagtttaaaatgatcctctgagcctgggcgcagtggctcactcctgtagtcccagcactttgggaggccgaggcggatggatcacctgaggtcgggagttcgagaccagcttgaccaacatggagaaaccccatctctactaaaaatacaaaaaaattagccgggcgtagtggcgcatgcctgtaattccagctactccggaggctgaggcaggagaatcgcttaaacctgggaggtggaggttgcggtgagccgagatcacgctactgcactccagcctgggcgacagagcgagactccgtctcaaaatagaaaagtaaaaaaattaactaattaattaaaacacgacagactcttaaatggcagaaatttattttctcacaattcaggaggctggaagtctgaggttagggagccacatggtcaggttctagggagggctctcttcctggcttgcagacagccaccttcttgctgtgtccttacatggcagaaagagaagagcgagttctctggtgtctcttcttgtaaggccactaatcccatcatgagggcccataactgtccaactcttaggttggagagttatccatccataacactcctgtgttagactttaggcttgccataatgtaataccacagactgcgtggcttaaacaacagagatttttctctcccttttggaggctagaagtccaagatccacctgctgttaggattggtttctattgaggcctctcttcctggctttgtagatgcccttttgttgctgtgtcctcacatagcctttccctctgtgcaaatgcagagagagcacaagggcaagctcttgtctgttcctcttataagaacaccagtcctatcagattaagaccccacccatgtgacctcacttaccctttattacctcctgtaggccctgtctccaagaacagtcatattagggcttcgggcttcagcatacaaatttgtgggggacacatttcagtccacagcacctcctattgaggaacatctgggttgttttggatcaatcttttgctggtacaaatggtgctgcatgagtgaccttgtgccaatgtcattttgtatttttgccagcctttgtgtgggattgattcctagacatgggctttctaggtcaaagggtaaattcatatgtgattttgctggatactgcaaaattcctctccatagagatgacaccattttgtattcccaactgtagtatataggagtctacttttttataatctcacagagtgtattgtaaaactttttttgccaaggcagtaggtgagaactagcatccctcagggtagttttaatttgcactgttttaataggagcaaggttgaggatcttctcctgtgtggaaggactgtgtgcatgttttcttctgtgaactatccattcatgccttggattaattagcctggttacagtgacagaggacctctgtggctgtggatctctgtaacagcaggtcaagttctccttcatccttctcatgacatgtctgctgtgagggagctgcagctctggtctgcccccaacatctgcgcattcaagccctatttggaatgtgccagtgtcatggcagagggcaagagcaagagctggtagaaacatgccttgtcttctaaagcctctgctcagctatggcttacatccacttacatgccactggttagagcacatggccaaagccgttctggggagtggagaaggaaggccatgtatactctcccaaaggagatactgcaggttgcatggcaggagggcagggtggagaaatgtgaaatcctcttgcccacatttctagagaaggaccttgtggtggtggtggtggtggtttcattccagttacaaaagttttaatttacctatgtttgtgtaaatgtttaaatgatgtccatcgaatatgtggtaagctctttgagggcaggagtatgttttttttgcttactcttatatccccaatgcctaccacagtctctagcacttactaaacaatctgtgcatagttttgaatgaatgaataattatgagtgtaattattttcttcctgacttttcacatatctataggttttcatggcctaatatatgataataaaactgaatctatgaagacaattaacctccttcagcgaatgaatatttaccaagaggtttttctcagtattttatatagagttctacccatacaggtatgttttgtgatattgaattattaatatcagatgaaagtcaaagtctgccattttgaactgaaagttatcacatcgttctttctgatcttcaactggtttagtagaaaatcagcaatactatattttttttccatgtatattatgaactttataagatactgctttttatttacataggatataaggtttttgtacacagatgcttcctggcttatgtatgtatgcggtctagaagctaataaatattttcatttgctctctgtaatcaggagtgattacacattcactcctgatggatctttgagagaaaaaatttgtaaagtcagcaaatcacaatgaccacttctcatgtgaatgacgtatcatcagacaaagttaggtataaaactttctagagtaaagagtgaagccagacctgtcacggacttccttcccctgtctcttctcggtggtgggaagaaaggctacccgaacgcttctctaatagatgaaaggggtgtgggcttgctgcttggaattagaggcaagctcctgcatattgtattcctactgtcatgttttaaatggcactgaggagggttagggctcacctgacaaacatgttttattgttcccttttacagaaatatttagagccagtttatttttatatttacaccttatttgggctccaggcgatctatgtcacagctctctacataaccagctggctactcagtggtacatggctgtcaggactgttggcagctttctggtatgtcacaaataggtgagttggagtcagtatgcttcttttttttccaaaatgtaagtaaaaatgaagtcacttcatttccagctcagagaaatttcttctgccacatttgtttggttgggagcagtttctctttggtttgcctggtggtttactcaatttttcttatttagttagggagaaagtgctacttacatgtaattccagctgaggaacagagagcattgaattgcatatcaagaaaatcattcataataatcccaaacctattatctgtttgctgggtgatcaagatttctccagccgcatatctcatctcttaaagggtttttttaaattggcaaataataattatacatattcatgggctacatagtgatatttcaatacatatagaatgtatagtgatcagatcaaggtaattaacgtatcagtcattaaaaagttttttgggtttttttcttgctgttttttaaagccaatgaagacttttaaaatttttatttatttaggggttgtttttgttttttgtagagacaggatctccctatgttgcccaggctggtcttgaactcctggcttcaagcagtcctcccaccttggcctcccaaagtatcaagattacaggcatgagctactgtgccttgcctaaaaagttttaattatatcttcactatcaaccttaatagggttgtgtatggctctcagttagtagagcttaaagataaaatgcaagggcgtttttgccttatttaatatctactattataagcagtagagccttatgaaatcacattttaaaaaaatgtattcaagatcattaaattattgcctgtcctataatggcaataccagtattcaataggagtcttaaaacttgaacatgagttctaatacaggttttattttgtaagtctaagcaaattacgtgttatgacagtcctgttgggggtttactgtatgccaagcactttacaatatgtgttatatgggttcttagaagaaccctatagagtagatattattattatccccattttagaaatgataaaattgaggctttaaaggttacattttgtatatagatacagatattacagacatctatatatatttcttttatatagagatatatgtagatatagatacattgtttgatacattgtttcatatatatctctatcttttatagagagatatatgtagatataggtaccttgtttgagatgtagatacacacacgtatattatgtgttacataagtgtatcatttattgaatgcctagtatgtgtggggatggtgtacaaagatgaaaaattttacccatacttgccctgttgggattcacattctagagaggcaggaagtttttttaaaaaatactgtcaatgacatatttaagactcaagtataaaaaacaccaaagaaatacagagagagggaaaatgtgtattgcctcttgacactaataaagtgagggagaaatgaaagtaagggtttggcatgatacatttgtgagtttaggagtaaggctaacctgggcttgaaccctaggtgctaagggcatacccatggacagagcacttaaatgttctctatgccaattttatgttacagggatgatgatgatgatgatgatgatgatgataaggacaattattgagaaccagtggccagaatcttaagtatacttgtccttaatgtaatatatctttcgttgaggaagtcttcgaggaaattattgtaaaaactatcactttggccatttgtgttttcttttgtgcagaatagataccacaagagttgagtttaccatcccactgagggagaactgggcgctgccattctttgcaattcagatagcagcaattacatatttcctgagaccaaacttacagcctctttctgaagtaagtgtttataaaatttcatatattttaatcccccaattttatatatgaagcttcaaaaaatgtgatgtgcttagtatcccaatgcatgtgaatagttcttattccatgaccaatttttaaacttgagttaaattaagttttcttttcgtgagcttttttctactttgcaaagaaaatgttttcatttttgatgttaaaaatgtactctacataatctacccttaaatagttgcagcaaacccacacacaatttctgcaaactgtcagaatttttaagcccttgctcttgagatgtgatttggtgcattatcgcctccataatagtgtggaatacacacaccgtatgtgaatatttatatgcaaagtgtcactttatgatagttagagcttaaataacaaatgcaagggttttcagagcaacagtttatggtttttctgtttggtttatagagatactggctgctcttgagaaaacttgtctgcaaggttttttattactagagacatgtaaattatacaaaggttttctttttacagaggctgacacttcttgccattttcatatcaacttttctctttagtctgacatggcaatttaatcaatttatgatgctgatgcaagcattagtgctgttcacactggactccctggacatgctgccagcagtgaaggtgagctttgctttcttttctcacttgagattttggccatttagtgtttttatatcatagaatgagatgaaaatatgcaagtacttatggataaaattgaagctgtttcttagatctgctgtaaatttgctgtggccaattgaagctgagtaatttatgaagcctagtttgaccatcttaacttttattcgcttattttaagttaaaaaatggaatggattttattttggggcataaatgcctaggtcaattgttatttatagagatgacttaaattttaaaatataagatagctcttttaaaatgtcttactgtgtactgccacttttaaaaaagaaatcaataggtatataacagcttttttgtagtactttataaaattttcatagtcacatttaactaatatgggatgtgaatccctgttgactggctgaaagtcacatgtgaaataaagaaaccagtatctgtctcctaatgtctgctgctgtcatttaatcacattttttcatgtgcaaaaatatgattttatgtattgcgtacagttttaaaatggcttatagttagtattctaaagtagtagtaacttaaatatttcccaagtataataaaatactttctccatatctaaggcagcagcatagcccaaggatttgtgctcatttattccatatcaaaggagatccagtaagcttccataactgactgagtctgaattaagaaacataaaagtctaccaagaaatacacattgcctgtctactgagacactgtaatagaatgggcactacagaaaatgccaatatgtgtaattcattgtcatagccacagtttgccttttagcttgggaaacaaagatcacagacaacaagaacaagcagacaaatgatagctgctaattagcaatactgatatatctaaaagaagaaaagttatttttaggcagagaagtgtttacagaagtaagaagctagaactggaccacctagatcacaagtgagggtagaatttgggtgggatgtcaggggtgggggcagaataggaaggtggaatgcagcaagagcaagtagataggactaagtttatatatgtatatgaaatgtttagtgtttctgcaggtgtgccagtgaccactcctacactgctggtaacctatacactcctataatctttctttagtgtagtttcacagtaggtatcaaaagcctaaaaatgtatttgccttttcaccaacatttctacccctataagtttgtcctaagtaaataatctgccatgttcattttagttgtattgtaataagaaaaagctgggcggaaaagataaaaagaaataaaaaactggaaatgacttgagccaatagcaatagggtatacttaaataaatgatggcatatctatgcaatcaaatattatataaccattagttcccccatatttttttgaaaaagcgaaacatagagaaaatgagtaaaggttctggaaaaatacacagtaaagtatcaacagtcagctacacgattgatgttctgcatattctttttgttctttagatcttttgattttttctgataatgaacatgtgtctctttttttttttttttttctttgagatggagtctcactctgtctcccaggctggagtgcagtggcgcgatcttggctcactacaacctccacctcctgagtttaagcaattctcctgcctcagcctcccaagtagctgggaatacaggtgcatgccaccacacccggctaatatttgtatttttagtagagacagggttttgccatattgcccaggctggtcttgaactcctgacctcaagggatccacctgccttggcctcccaaagtgctgggattataggtgtgagccactgtgcccatctgaacatgtatctcttttaaaattagaaagcaaaggtactgttttggctcacatacacaacattttaaaataatatagctaattgattttttatttagttctaaactttgttcaacttttacatttgaaactgtgttggtattagaagtagttttaagtatcagactttaaggaggaacattattacaatgaaaggatcctgagttataaaactaaattgctgctgtcaggtctgaaaataactggctctttcagcttaggcaagtgatttaacttagtttcttcataaattagaatcacttctctctaaccatgtcaaatgggaaagagtcagaataattggtatagaaaaaggtaatacaaattcagagctcagtgtggtgacaagaagcagtaccttctacagtacattttgtcatcttttcatgaatgatgaaactcttaccagcaaaacctcaagtttccagtcagaaatgtgaacagagtaaaacagaacagcaagcatattataaagtgtatacttttgcttaattaaaggctaaaatatggaggttaataaagttttcttaatctattgtggaaacagacgcattcatgataaatgcttaagagatcatgttaagtaccctacatggttccagacaagagggagtagagacatttctccccgttcctccccaaagtacattgaaaaaccttagacagtatatgtatataacaaacataagaggaatttgagaggtagagagaagcagactgcctagggaccttgcgaccagagggaaaatttgacagcgagtttcttgggttttctttttgccccatatatccttgactgggtgctggagaagtcagaaacctgggaataacaatggactcaaacaaaaagcctcctccctctagcaaaaggaccagaagagaggaagcctaacaagacagaaaactttcaaacattaactgccttattctagcgaaatgctacagaagcaaaaccacagctccactcccacctccatcagtaaagttcagtgggaagcctagattcctaccctcacctagctgtcactaggcatgccttgcttcctgccagagctatgtcagagaagtctagtggggaaccagaactttcaccatctcccagagacatctgtgaaggccacttgggaaacttggacttcaactctcactcagtggtaatgagacatcctgtcccctctctatcaggatggtgtcagagaaggtcaacagggaggttgagactctaaccaccacccagatgtaataagcctttctctactgccctaccccatgctgtcggtgcaggccatgtagggagcagtggtgacgcacctctgtttctcccagccagcatgtgtcagcagggacctgtagagagcctgaactttcgccttcacccagcaataaggaagtacaccttctgctgacccccagatgtcagtggagggcaagtgggcaccttggacttccatttccgtctgaaagtactgaggcagcacccttctttccccattagcatagcgttggcatagtttgaatgtttttgtggtcccccaccaaatttatatgttgaaacccaaatccccaaggtgattgtattaggaggtaggtagggccttttagaaggtgattagtgccattataaaacaggcacaagggagctgtttcacccctttcaccatgtgaggaggacacagcaagaaagtgccatcagtgaaccaggaaataagccctcaccagccactgaatctgccagttccttgatcttggacttgccagcctccggaactatgagaagtaacttttttgttgtttataagctacccagattacggtattttgttagataacagcctaaatggaccaagacacatggtgtcacaggaggcctgctaacatggcagatttaaataagatccagggtcccataatgtaataggatacagttaaaaatcacttcttaggccgagcgcagtggctcatgcctgtaatctcagccctttgggaggccaaggcaggcagatatttgaagtcagtttgagatcagcccgggcaacatggtgaaaccccgtcactactaaaaatacaaaaattaactggctgtggtggcatgtgcctgtaatcacagctattcaggaggctgaggcaggagaatagcttgagcgagccaagatggggccactgcattccagcctgggcaacggagcaagactctgtctcaaaaaaaaaaaaaagaaaaaaaaattcttatattaagaattaggaaaatctctcttgagtgaaaagagacaatcaatagatgctaacactgagatacacagaaattggaattatcttacaaggaatttaaggcagccatcataaaaaaaaagcttcattgagcaattacgaacacacttgaaacaaatgaaaatacaaactctaagcaaagaagtagaagatacaaagaagaagcaagtggaaattttagaacagaaaaattccagtaatcgaagtttaaaactcagtggatggactcaacagcaaaatgaagtagtcagaggaaagaatcagtgaacttgaagatagaacaatttagaaattacctaatctgaacaacaagaaaaaatagaatgaaacaaaaatgaacagagcctcaaggacctgtgagactataatgaaaagtctaacattcaggtaatcagaatcccagaagaagacaagaaaagagtttactgaagctgaaaaaagtatgcaaagaaatactttcggaaaaaatagttgaaatttcctcaaatttggcaaaagctataaaccttcagaatcagcaagctgaactaatatcaaacaggataaatccaaatagagccacactaagacacattataatcaaacttttggagactaaagataaattttaaaaaattgaaagtagtcagaaaaatactgtacctataggggaaaaccaatttaaatgacagtgaattcctcatcaaaatcaaggaggggctgggcacagtgactcacgcctgtaatcccagcacttttggaggctgaggctggtggattgcttgagcccaggagtttgagaccagcctgggcaacatgatgcaaccccatctctataaataataataataataaaatgattagccaggcatggtagcaacgtgcctgaggtctcagatacttgggaggctgaagtgggagaaattgaggcttcagtgaactgtaattgcaccactgcattctaacctgggcaacagagcaagacccagtctcaaaaaaaaaaaaaaaaacaaaaaacaatggaggccaaaaggaagtggcctagtattttcagatgcagaaaaaaagaactgtcaaggctgggtgcagtggctcacgcctgtaatcccattactttgggaggccgaggcagacggatcatggggtcaggagatagagaccatcctggctaacatggtgaaaccctgtctctactaaaaatacaaaaaattagccaggcatggtggcaggcgcttgtagtcccagctacttggtaggctgaggcaggaaaatggcgtgaacctgggaggcggagcttgcagtgagtctagatcgcgccactgcactccagtctgggggacagagcgagacttcatctcaaaaaaaaaaaaaaaaaaaaaccatcaacctacactcctatacctagttaaaatgtccttcaggaatgaaagggaaatcaaaacattctcaattaaggaaactaatattgccagcagtcctaccgtaagagaatagctaaaggaagttgttgaaacagaaaggaaatgataaggaatttaagagcatcagaaaggaagacaaggcaatgaaaaaagtaaaaatgtgaataaatataacagacttttcttattctcttgagtttctaaattacgtttgaggctgggcgtcgtggctcacacctgtaatcccagcactttgggaggacgaggtgggtggatcacctgaggttaggagttcgagaccagcctggccaacatggcgaaaccccatctctactacaaatacaaaaattagccaggtgtgatgatgggtgcctgtaatcccagctactcaggaggctgaggctggagaattgctttgaacctaggaggcggaggttgcagtgagccgagattgtgccattgcactccagcctgggagacgagtgaaacttcgtctcaaaaaaaaaaaattatatttgatagctgaagcaaaaattataacactgtcttatgtggttctctatatgtaaaagaaatactttaacaatataaatgggaagggtaatgagacttaaatggaggttagggttctatgcctcactcaaacagttaaaatgtctataccactagtccgtaataagttattaatgcataatgtaatagccagaataaccactttaaaaaactatacgaagcagtacatgaaaaaacagtacagataaataaaaatgaaattgtaaaaatgttcaggtaacctacaggaaggcaggaagaaggaagcaggaattagaagcaagcaaacaaaaaagaataaaagagcagatttaagactaaaatagcaataattacattaaaggtaaatgatctaaatatactaattaaagagatggcagggtggatttaaaaagcatgacccagctgttgtctaaaacacacttcaaacacaacaatatagataaattgaaagtaagaggatggaaaaagatacaacatgcaagtatcaatcaaaagaaaggagtagctatgttaatatcagagaaagtagatatcagagcaaagaaaattactagggacagaacagaacattatataatgataaaacgttcaatgtaccaagaagaaatagcaatcctaagtgtacctgcaccaaacaacagtactgcaacgtgtgtggggcaaaaactgacagaactgaaaggagaaatagaaaaattcacaatcgcagtttgagacttcagcacatctctctggacaattgatagaacaccagacagaaaatcatcagagatatagaacccaacaacaccttcaaccgacagaatctaatgatcatttatagaaactccacccagtaacagcagaatactcattcttttcaagcattcacagaatacttaccaacagactatctcccgagccataaaacaacgacaaacataaaagaattaggattatagagaatataatctctgactgcaatggattcaaatttgaaatcaatacagaaagataacaggaaatgtttcaatacttgggaattaagctcactattacatctatagtagtaatagccagaataaccactttaaaaatatataaagatatacactaaaaaagagtctaagaggaacctcggagagcattgaactcaatgaaaatgaaagtgaagcatgtttaaatttgtgggacacatccaaagcagtattaagaagaaaatgtgtagcactaaaaagcttatattagaaaagacagaaagtctgaaatcggtcatccaagctctcaccttaaaaaagggagcaaaataaattcaagccaggagaagaaaataataaagagcagaaatcaatgctattgaaaacatgaataatagaattaattaaaaagagctagcttggtcgggcacggtggctctgcctataatcccagcactttgggaggctgaggcaggtggatcacctgaggtcaggagtttgagaccagtctgggcaacatggtgaaaccctgtctctactaaaaatagaaaaattagctgaccgtggtggtgggtacctgtaatcccagctacttgggaggctgagcaggagaatcacttgaatccagtaggcgaaggttgcagtgagctgagactgcaccattgcaccccagcctgggcaatgagagcgaaactccgtctcattcatagatagatagatagatagatagatagatagatagatagatagatagatagatagattagataagatactccatctcattcatagatagatagattagatagatagatagatagatagatagatagatagatagatagagctggctctttgaaagattagtaaaattgcgaaccttctccataattaccttggaacattaaaaacttttcaatcttaacagactttgaaagttctgatctcaggaagagtgggaggtgggtgggtgttgagtgcttaatggatataattcacattgagtgatagatacacgaaaagcccagacttcatcagtatatgttatgtacgtgtaacgaaaccgtacttatatcccttaaatttacacaaataaaatgtgtaaaacaaagttttgagcctctgtggtactatttacgtggtagccaatattgcatagtggttaagaacacagactctacaactaggctgcctaagtttgaatgagtcatatgtgggtcgtatggaacaatgcttgctattttattaatgttaaacagatattaactgtggttattatgaatggtgatgaggagcatggacacgatccattgaagacagctgtagttattctacacagaaaggatatacagttgacccttaaacaacacaggggctactggtgccgatgtctccccccagcagttgaaaatctgcacacaatttttgactccccaaaaactcaatcgctagtagcctactgttgaccagaagccttaccaataacatagttgattaacagatattttgtatgtgatgcattatatactatattcttattataaagtaagctagagaaagggaaatgttaattaaatccaaaggaagagaaaatatacttactgtttattaagtggaagtggatcatcacaaaggtcttcatcctcatcttcacattgagtaggccaaggacgaggtacaggaggggttagtcttactgtctcgggagtagcagaggcagaagaaaatctatgtataattggacttgtgttgtttaggggtcaactatattcttgctgccttgtttctatactgtactgtactaatagaactgggaaagaatatccagtacaccgctgataatccaggacttcctaatacacagtactgctcaattttacatttttggctgttcatcagcaatttttcttttgaatgtatataaaactatacaatcttgttgttacacaaactgcccctttttctagaaatactctcacttgatataaaaagaactgtaaacatcaaaaaacacccacaaataaaggcaaccagaaagatgtttttggaaaaaaagcatttgtaaatgagttagtatccttaagagttcctgcaaatccatgagaaaaccatttataaaccaatgagaaaagggaacaaaggatacaaacacttcctagaaagaagagcatcaaaaagggtcaaatgcataggtacaaatgtaacacaaagtgacaatttacgctttacaaaacaccacaaagcattgttgaaagttttaaacgcctagattggaaagataattcacgttcttggattggaatacttactgttgttaagatggcagtgccccccaaattgatctacagattcaacacattccctctcagaatcccaggaggagtttttgcagaaattgacaagctaatcctgaaattcatatggaaactcaggggactcagaatagctacaacaatcttgaaaaagaagagtaaagttggaagactcacactttccaattacaaaacttactgcaaagctatagtaatcaggacagtgtgatactagcagaagaattgacataaacccatggaatagaattgagagagagaaataaacctgcacaagaaatggtcaattaattttcaacaagggtgtgaagataactaaatggagaattaatggtgttttcaacaaatggtgcaggaataactgataccgacatgcaaaagaatgaagttgagccccttcctctcactgtacacactaactcaaagtgaatcacagacctaagtgtaagagctaaaaccaaaacttttagaagaaaacatagtaataactcttcctgaccttggagtagcacaaaccttagatacaataccaaaagcacaagtgacttttacaaaaacagattaattggacttcatcaaaattaaaactgttgtactcaaaagtgtgctattaggaaagtaaaaagacaacccatagaacgagagagaatatttgcaatcatatatctgatcaggaactcccagaatatatgaagaactcttataactctttcaatgataaaatagcaaaggatttgggtagatatttctccaggtaagatacataaatgtccaataaacacaggaaaagatgctcagcgtcattagctatcagagaaatgcaaatcaaaaccacaagcagataccactttacacccacttggatggctaaaattaaaaaacagagacaaatgtcgcggatgtgaagaaatcagaactctcatacattgatgatgatgggattataagatggtgtagtcactttgaaaaacagcatttcctcagcatttcttgattttaatatagagttaccatatgatttagcaatcccactcctagatacatacccaagagaaatgaaaacatatccatgcaaaaatgtttgtatatgaatattcatagcagtgtgattcatagctacaaagtggaaaccacccgaatgcccatatcccttccataaacagtgtagtccggctgtgcaataaatagtgttcagcaataaaaaagaatgttgatacatggtgcaacatggatgaaacttgagaacaccatgctaagtaagagaagatagctaaaaagactgcactttattccatttctgtgaaatgtccagaatatgcaaatctgtagagaacagtacatcagtggttgccggagctgggggtaggggatgatggagagtgatggctagtggatatgggtttctttcgaagtgatgagaatgtcataaaattagactgaggtgagagttgcacaactctatgaatataccaaaaatcatgaagcacactttaaatgggtgaatttgatggtatatgaattatatcaactaataaaactgctaagaaggaaaaactcttccttctctaaccagtagttgtactcagggatctatccctaaggaaatgtttttattcatcagttcctccaatgtttattaagtgccgctcttctagtgtgtattctttaaggtgctggggatacagcagtgaacaaaatatgtaactaatcagacaattcggttaggaattctgagaatcagacctgaaaaaaatttttaaagagatgttcacaatgttaataaaaagccagaaacacctaaatggtccagtggcaaacaaattatggcatatggtggaatgttacataaccatttaaaatttaagttttcacagaatagtcactgatgtgagaaagtgatatggtaggatgtgaaggatgtaaaatcctgtatatgaaatactatatactgctgtgaaatcaatattatttctttaggtaatggtgctgggttttgactcaagagcccacctattgattgctatttcttttttgtgtttttctgaagtgtctaactctcctagagtaagatacattatctttatgatcctaaagatcatcagcatccatttccctgagttcccattgacactaagcaaaagcactgaactgctgcaagcctcacttttcaatgcttctatcaataggtttgtttcccttgaggttaagagaacaaaaccatggggataatcggatttgctgctaaataaaacgtatttttcacttgtcagaatgagtatggcattgtctaatttgaaagagaagaagaaaactaacagaataagtgtccactctttattagggactgccttttttttctttgtggcgtgtttcgtgtattcaagttagttgtgttttgcttcttttggtatcaacctatcaataagtttcattacatcaagagttaatccttagtgctcattatgtgccaggcatttcctccccacccacgcctccccactttttttagagaccaggtcttgctctgttgcccaggctggaatggagtggagcgatcatagcttactgcagcctcaacctcctggactcaagtgatcctcccacctcagcctcctgagtagctgggactacttgcaccactacacctggctagtgttttatttttatagagacacggtctcgctatgttgcccaggctggtcttgaactgggctcaagcaatccttctgtctcagcttcccaagatgttgggattacaggcattagccaccgtgcttggccaccaggcattttcatccattaccatgtctggttcttctgtgagaccctacatcaactctgtgaggaaggtatcatcatctcttgttcacgatgaaccatttaggtcacatagctggtttgcaccagaatcggaactgcagtacaggtgctgttggtgccggagctgatgtcattgcccagtgtactgtgctgcctgctatgaagctgtgaggtcaaagaggacaaggtcatgcagcaggaggggtttgcagtctaatcaggggatctgggcacacactcacacagacaaagcaaggaatgatacagtcctaaagtatagagtatggaaaactaggaaataacacagtaaagtacttattggtggtcataaacagtaactgaaatcattgaaaagaaaactgaagattataaatggcccttgccaattcccaggaataaatacattctgctgttgtttacttcctctacttcatatcatccctctttacttcccctttaattaatgttagaagatttctgttattaaaaggtaaataaacagttggtatgtgtatgatttagtttccttttttagattgtgtttctttttttggagtctcactctgtcgcccaggctggagtgtagtggcgcattctcggctcactgcagcctctgcctcccaggctcaagcgattctcctgtctcagcctccgaaatagctgggatcacaggcacgagccaccacgcctagctaatttttttttttttttttgtatttttaatagagatggggtttcaccatgttggccaggctggtcttgaactcctgacctcaggtgatcccacccgcctcggcctcccagagtgctgagattacagatgtgagccaccgcgcctggcctagattgtgtttcttgaatctacatgtgttttctgcattatttgtaagctgaggtgtatccacctcatgaccaacatgtcgacatgtgatgatctcttggtaaaatgtctgtactcatctaatctttggttcttgcaggcgacatggctgtatggaatacagataacaagtttactcctggtctgcattcttcagttttttaattccatgattcttggatcactgcttatcagttttaacctttcagtattcattgcaagaaaacttcaggtaggactttttttttgtcctttatcaaagtaaacttttttttaattgcgtggtttattgaaccttattttcacacagcatacaaagggaaatttacaacctgatttgcactaaaaagagcacgtggcattgtgtgctttttcttgtgcatgtggtagcatttctgtttcaagctttctgggtcatccttttattttgacagttatttcttagagaattggaaccttaccttcaatgtggggatcagccaaagatgcttggttgaatgccactgatttaaaattgaagtaaaagagaaaagttattaatttttatgtgtgtgaactcaggagcgagaagagtctcctgcttgtgttgggagcgtgttcattacagtccttcacgttggtggataccctgttatttgatgtagtaatgctactcttttccccatccttccataccatactagttatttttaggtgaattaaaattaactgttttgagaattttgagaatccaaataaataactttagaaataatgggacatttcctagggtattgtcaaatcatgtttgaaaacaatgacttgctcttttagctttatttatataattaaatttcttatatttacataagatatgagtcatttgtttttgcttaaaattacaacatcctgtttcacatatgctagaaacttccgtgtcaagaagccattttgttttccacttttagaagaagaaatcatttttcttattagtcttttgagtgagaattgttatggacaaaggtttttagttgactatcaaaaacaacagttcacagtcatccttttaaccttaattataaatattactcgtatttgaactgttaagatattattatatttaacaatgtataaaattatcaagattataagaaaactattatatgtcaaaaggcacaatgtacttctttttacacccataagtcttttatgtaattgacttgtaactatgcccgtggtgtaggaattaatggataaaagatgtaacagggccaggcgtggtggctcacacctgtaatcccagcgctttgggaggccaaggctggcagatcacgaggtcaggaaattgagaccatgctggctaacatggtgaaaccctgtctctactaaaaatacaaaaacttagccgggtgttgtggcaggcgcctgtagtcccagctactcgggaggctgaggcaggagaatggcatgaacccaggaggcggagcttgcagtgagcggagattgctctgctgccctccagcctgggcagcagagtgagactccgtctcaaaagaaaaagaaaaaaagaaaaagatgtaacagtttgttcagtcagcgtatcctgagtaccttccaaatggcagaccccaatcctcctgtttctaaggtctgaaaaaataattaggaaaaaaaagactaggacacatttcctcatcgtatgaagctcattattaagtgattcatttactactagaaaatcacaaatattaagacagtgtaacctcatgaaaatgagtaggttgtattttccacatatattttccctttatgttatatgagccagtgtttttaaatccttaagtaagctcatcttcagtgtttatgaagttatattaaaacttaagaattaaaacataactcttttaatttctagaaaaatctgaaaactggaagcttccttaataggcttgggaaacttttgttacatttatttatggttttatgtttgacactttttctcaacaacataattaaggtaagttaataaaaatgacatgtttaatgtatttttaattaacttatggcattggagataatttttgaaactttctttttcttttttaataaactaattgttttagagacagggtcttgccgtttcctaggctggccttgaacacctggtctcagatggccctcccaccttagcctcccaagttgccgggactacaagtgtgcaccaccacacctggcttctttgaaacttttaattttaaataaattcttgctttataaagtgtattaacgtgactcaagagttaccagttttacttcaaacaggctcagttttaactttgtcttagtagcaaggattattttgttgattttagtcattaatttctatgtactcttatgtcccaccttgaacttactcaccttttgttatgaaacttttaaaagcttaacttaaaaagcattaaacaaataatttctctaaatttaaaatttttatttttagtaccgtaatatacacgtagctttctgtactgtggtacttaaaaaaaaaagacatgatttttaattgagttcagttaataagtaaagtggccttactatctactttctgctggaaagaagagttgagctcatttttcccaacatttaactgacttatatgcaacaggcctaacagaacaactcatttggtaacgtaggcatccattggttttatgtccagtaggtgctttgctaagatttttacaatgccccaggggctctgcttagtttaacatgctttttaaatgtttttattggcgttttaattttttttcagggtaggctttattaaaggtataattcttggaccttgatatcccatttgtttttatgctagagcaaaactacattggtatcttcagatacttttgcctgtcctagaaggttggtctcaggataggaggcatctgcaaaacaggctccttctccacaagagaactgtggtccttgttcacgtctgttgactatcaaagaaaaaaaagactcttcactcagccagtcactatgtcactatgttctttttttttttttttttttttggacagggtctctcacccagactggaatgcactggtgtggtcatggctcactgcagcctcgatctcctggatttaggtgatcctcccacctcagcctcctgagtagctaggactatgtgtgtataccaccacaccggctaatttttgtattttttgtagagacaaggttttgctgtgttgcccaggctggtcttaaactcctaggctcaagcagtccacctgccttggcctcccaaaggattgtaggcgtgaaccaccatgcccagctgtcagtatgttcttaaactccatacagtcaagtacttatcaataatttatttttaaatttctaaattttttttgctttttttttttgagacaggatctcactgtgccacccaggctggagtacagtggcacgatcttggctcacggcagtcttgacctcctgggctcaagcaatccttccacttcagcctgagtagctgggactacaggtgtgtgccaccgcccctggctaattttcacaatttttgtagagatgggatcttgtcatgttgcccaggctggtctcaaacacctgggctcaaggtatgctcccacttcagcctcccacagtgctaggattacagacacgagctgctgcactcagccaaaagctttttttgagttgatgaataccccatttatcctgatggaattattacacactatatgcctgtgtcaaaatatctcatatactccataaatatatacacctatatgcccacaaaaattaaaaattaaaaagcctattcaaagccaggtgtggtggcttatgcctgtaatcgcagcattttgggaggctgaggtgggaggatcgcctgaggctaggagttcaaaaccatcctgggaaatgtagcaaaatctaaactctactaaaaaaatttttttcaaaacttgagtggagcagccaacatttctggaagagtggccaaagatacacagttcttgcattggcccactctacacattcagtgacctgttcttggattaaaccagtaaagagctgcatccctggaccaccattttttgactccccgaagaataacatctgttgaattgcatttgatgttttgccagtgacctacaacaagaggaagtagagaaaattttccttgaaagtccttgctgtttttgctttacccatgggaaaaaattattttgagtctcagttctaggactgttaagatctcttccgagcaactgttttgttttactcttataaacccgtgagtaacataaatatgttgacctccctgtttgcatttgctgctggaatgcaaaagaccagatttgtggctcatctctaatgaatatattgtgtgtactgaactcaattttagcttcatcttttctccctgtcttcatttttcttctaataaattttttcaccatttatgttattatatatggatttttaagccacaaatttaaaatagaattatatgagttaaaattgtaatcactaatgatgaacactcatatttgtctgtccaccccttcagggttacaactgtcttgaattgtctttgagtgaataagtcttggatcaattgtatccacagaccaaaagccccaaagccagacaggctttgtgggcggtgtatctatttgaggtttcagatcatcgtcttgtcagttttctggtctgaaaacttatgcacactatgcctcagccttctccctctccctgaaaccaaaaaatctcatcttttacctattttgcatatttaacttatgtataagatgttttttgaataaaggattatgctaaaaaggggagtggggtttggaaggagtttggaagtccctgctttggaattcctcagttctgagaactactgtgaacatttactgattttgtacacccacacgctcctgtgaaattggacactgaatatgtaaattcaatgggaagttatcaggaaaccgtgcctaaaggactaatagcaatttttgttttctctttccccgatagaaaattcttaacctgaagtcagatgaacacatatttaaatttctgaaggcaaaatttgggcttggagcaacaaggtataactgaattgaaagtctatgtttgctattttctattgaatcagcagggactttaaaacttaagttgtcattgtgccttcaactattaattgcagactccctctgaggaaagatgcaatgtcatttctttgtcttatattgaatttaatactttgctttccatttgttccctagggattttgatgcaaatctctatctgtgtgaagaagcttttggcctcctgccttttaatacatttggaaggctttcagatactctgcttttttatgcttacatattcgttctgtccatcacagtgattgtagcattcgttgttgcctttcataatctcaggtatggtatatttcagaaatctaatgctctcctttaatgaacttgttccatgttgcagaaaaattgcaaagttgaaagtcagaatatcagacacaagtaatagtattcatcttaaagggggaacatacctcgtttagagtggactacactcccagtagttaggagacaacagagtaatgatcagattgcatgcggtctgggcttaagtcttggcctgcacacttgggaacaaagtgactcttgagccagttacataaccttttgatatgtccatttccttatctttagaatgggaagactaagagtacttactctacaggatatttgagaaataagtaaaaacaacataaagcacttaaaatagtgtctggtgcctagacttcggcaggtacaagccatcgtgaactggtttcattatcactgttgactcataagcctctgttgtgtttccattattagcatcctgtgtttttctcccttcctcctctagctgcttttttgtattgctcttgaaatgtaagagttaattaattattgctcatttgttttcttgcatcttgcttcagggctcataatgttggagtggaccataattattagtatctactaaaagttttgagtaataactgccaattttaaaaaactaagtatatctaccaatctactgaaagaaaaaaatcaggagtatgaaggctttttaaaaacttgtaagaatatctacccatcaagctgctgggggggtttgcattgactcttcgtgttaaactgaaagaaaattaagtgtaagaagttgaagctgctgtcatttgtgaaaacttaatgaagctcacgaggaagccctttttctgtagttaccttgccaattaatgtgctggtgaactgtgattcacagccacgagagagctgtcattaaaatgagtccagagcagttgagaggttttatgatcattaagaatgaaacaacattgaaccatgaaaatatttcattgaacataaactattttactatccttgagaagtgttctttttcatacctaacccaagataaaatttagccctgtgaaaatagatggaaattattctggacagtgtgatttaatatcattccagacatagcaagtgtcaacaggactctggactgcatacaaagcaggaagttcagtgggcctgcagtatcttcctgaaaatgtctgccatgctctgtgtgaatctatgagccatctctggaggctgattgggtatatgatcatagataaaagattttagagcatcttcatctgccagatagggatattaggactttattagaggaaaagcactacatgaaagtaattaaagaatcatagtccagtcatgtcacttaacaagggggatatgttctgagaaatgcatattaggcgattttatcattgtgcgaatatcatacagtatacttacacaaacatagatagtatggcctactacacacctaggttatgtggtataacctactgcatctaggctgcaaacctggacagcaagttactatgtttaatactgtaggcagttgtaacacaatggtaagtatttgtgtaactaaatatatctaaacatagaataggtacagtaaaaatataaaggccaggtatggtgggcctgtaatcccagtgctttgggaggttgagaaggattgcttaaggctaggagttctagaccagcctgggcaacatagcaagaccgcatctctacggaaaaaaaaaagaaaaagaaaaattagccaggcacgatggtgcaaacctgtagtgctaacaagtcgggaggctaaggcgggaggatcacttgagcccaggcgtttgaggtttcagtgaactataattgcaccattgcactctaccctgggtaacagagtgagaccctatctctatttttaaaaaatactgtaataaaagattaaacattgtatacctatatagggcagttttcataaatggagcttgcaggactggaagtttttctgtgtgagcctgtgagtgaatgtgaaggcctaggatgttaccatacactattgtagactttataaacactgtgcacttaggctacagtaaatctatttaaaaaacaaagtgattgtgctatgaccttataatggctatgatgtcactaggcaataggaatttttcagctccattataatcttacgaatccactgtggtatgtgcgatctgttgttggccaaaatgttatgtggcacgtgactgtctaaatgtgaattaacttttaaataagggccttttgtcagtgccaagtatttaaagtatttctacctttttagtactaggaaggatgatactatgacttgttttgttttgttttgttttgttttgttttgttttgttttgaaatgcatctcgctcttgcctgggctggagtgcagtggtgcaatctcggctcactgcaacctctgccttccgggttcaggcaattctcctgcctcagcctcctaagtagctgggattacaggcatgcacaaccacccctagctaatttttgtatttttagtagaaacagggtttcaccatgttggccaggctggtgttgaactcctgacctcaagtgatctgcctgcctcagcctcccaaaatgttgggatgacaggcatgagccactgcaccctgccagatactatgacttttatgtagacatctgcattagtgtgaggggtacatctgaaaggggcatggtgttccctgcctcagcctcccaaagtgttgggatgacaggcatgagccactgcaccctgccagatactatgacttttatgtagacatctgcattagtgtgaggggtacatctgaaaggggcatggtgttctgtgttcatggaattaatcagagccttccagcttggctgggctatgggggaggtactgcagacttctcttaggtatctagagaggataagagcagatactccccttgtctgttttatttttatttacttttcacaccttgccctgttgatggatattcttatttggagtatcctttttgtaccaatatggaaaccagtgtttgggttgtaatatttacttttaagtaaagattccaattgtgaattaccaatggtgagaactgccttagagtatccttttaattttcgtatgtatttatggtaggaaaaaaaggatttctgggaaataaaaaaagtctctagttacatagagaagcatcgtatgtgcccagttctattgggtatgtatgaagggatcagtagaccttcatgaaagtttcatctttaactagtagcctttactgttgttttcttttcccctcgacaacaaattgtgcaacatctaaagtcactgatcagtcttaacatcactgaagtggagacagccaggcagtgtgtgcttcccggtgtaatgtgatgtggaatagagccgtcctgttttctgtggaaatatgtttcaagtccctcagtggatgcctgaaacctcggatggtttcacaccctttctatactatgtttttttcctatacatatatccctgtgataaagtttaatttataaattaatcatggtaagagaataacaataataataaaatacaacaattatagcaacatgccagcatcacttctcttgcactttggggccttagttatgtaagataagggctgtttgaacacaaacaatacagggacatttaaatgtatcttactttattagtagtttagtagctgaatgtatctgcttgtctgtctcgggtaggtgggtagactatacagcgtggaaacacaggaccaagggatgatgatctgagtctcaggtgggacagacagggatggagagatttcatcatgcaacacagaatagcatgtaattcaaaactatgaatggtttatttctggaattttcaatttaatattttcggacagcagtttcctcaataacaaaccactgaaagtgaatccaccgataagaggggactactgtgcatcataaccccgtgaagtgttcttgccaaaaaaatgaacttgtgtctgataaacctctagatctaattacaagtttacaagaagcatgaaacgtataaccaccactgtgagccacacctgggagacgggaacagcttcaggacatatgttctctattcttccacaaacaaatggcctgttttttaaaaaaaggagatacttttatagatcaaaagatatttaaagatatatattagtgaaatgcaacatgcagttcttagatcctgattcagagaaacctgaaaaaagcaattgatgcaaacagggaaaatagaacatgaactaggtattagatgatgttaaggaattattgttacttttattgggtgtaataattttaatgtagccgtatttggtaaaagtcatcttttggatatcaggaggtattggtaggttaaaaatgtgatttttgaggggtcataaaggaactgaattccaagttaatggatgtgtgttttgcttttgcttatttgtaaaaatttgaaaaatactcataataactggtaaaacatcttttaaaaatctctttcaatttcagcaattccaaaaaatttgagtttttttttttgcattctcttttaatttaaagaattgaagcactttaaatttttacttcaaagctgctgtgaaatttcagtttttctcattattaatgcatttatattgttacactttagcctcataaattcaaaattgatcaatgcgaattcatttcatcttatggaaataatcaatttctgaatacataaaggcatacatttcttgtatcttcttcttttacaaagatctaactaaaattatgtttccagcttaaattttgtatgttgctgttttactcagtgattctacaaatcaacaatccgtgggtaaaatggaaaaaggcacagttgacctgaaaccagaaactgcctacaacttaatacataccattctgtttggattcttggcattgagtacaatgaggtatttttgtcttacctgtttgtttactttttatttgatcactcttgatgttacttagcaatataatttggaaagtgacaatcatcttcattaatgatcatggttcccataaaatcatccttatatcctatcttctctcagtataaaatactcaacatcagtttttacaattaattacaaacacgcctctatgttttactcaaagcatagtcttgaaaaggcagtggagttaaacaacgaacccttcggcaaatggcatctgcatagttttaagtaagattttgccgtcatagactgtaaagctgcctttataggtgtctcagaatccaggtttatatacaactagtacttctgacttgcgcctgtgtctgttcttgcagaatgaagtacctctggacgtcacacatgtgtgtgttcgcatcattcggcctatgtagccctgaaatatgggagttacttctgaagtcagtccatctttataacccaaagagggtcagtgtcatccctttttccatctccttttatgacttgcagtatttctttcataccacttctttttttgtttttcagtagctgtgagataaaatggatactgaaattgaagctgaaaatacataattgatatattaagattttatagggaattattttaaaataattttattttaaaaaattacttttttctcagactataagttagatatgttcattatacagaatttggaaatacaaaaaaaagcacaaaaggggaattaaaattaccaataatccccttgtccggaattataactgttgttattataatgtattttcataaagataattatttatatatgtatgacaatttttcagtagcctataaatgcagttttgaattgttctactccataaattcactaggtggcaatatagtagaagctgcagatatcttacaaatgattagaatcctagtatcgactcagttattctgcatattggagacttgtgctccattaaattatatttctggtaattttttaaggcatatatttacaaagcaaaactgtaaggcagaagtgtttaaaaaagccgggcacagtggctcactcctataatcctagctgctcaggaggctgagacaggaaaatcacttgagcccaagaattccaggccagcctaggcaaacatagcaagaccctgtctctcaaaaaagaaaaggttcaaaatacttataatctaaataatgtctttcttatatagatatgtataatgcgatattcagtaccgatattaatactgctgtatctatgctataaggtaagactgattttcctcattcttgtcattcatgtatttagcagaataattgctttgattcaatatattttgtgtattatttggcaaatagagtggtttgtgaaggttataaatacctccttagcttcttactgaaggtgacattgatgggaaaatggatctttttcccaaatagttttaacaagtaaaaacatgatagcgaaaactactatagcatttaataattctaattaattttgatttagactcttaatattcagctgatgcaaattctgaaaataaggtgttttcagacctattttgaaatgaaagtaggaaaattattttcccattacctgatttatatagactaagagatttttaaatgtatcttactttaagctccatattttattagatgcttatcttcataagagaattagacacataaataaacacagcctaaggctaggctttttaaaatctgttcttcagtatcaataggaagtatctggatttttcatattctcatttgactagtttctgaaacagcatgaactgccctttaattcagagaatttcttatcagagacaatgatcattggtcaggttgactgtggctttttgtcacatctttgacattggcagtcttgaatcatcactagggcagatagcacagactgttttatccaattgagcttctgccctctctttttaaagaacctaacatattaagtttatattttttttcctttaaattttactttaagttaaaacgacggatttcaaactctactgtgtagaacccctgatttgggagggtggctaaaagcaggggtgatgggacctcccgcagagaggatcagctagagcagctcagctttggggtttatttgcttatattttcatgtaggattttgtgaaccaaaggtttcaggctaaagaaaatattgctaaatactatattgtaaatatttcaaaaaaatgtgttctgttatgagcctgtctatcaaaacatttaccattagcaaaactctgtgctaactcctagatattaaaaaacacacaaatagatttatgcctccccacctctgggaattttattgctctaatgcgaataactgaaacttactaaaaacatctagacacgaacagttaaggattaaacagtatatgttactgaggagtcctgtcagtttacctttacacaatgattcagtggattaaagcaccctcctcacagaaaagataaagctcatgaatgtttttctcaccactgaagatgtaccgaacaataaccatctttcatactgcccgtgtgcatgtaggttcagttcttttatgtctcagctatctattgaaattttactgatttttttaagctatttgaggactgaggtgttttgttcgtaataaaattgaggaaggacattgtataagaagtaaactgtcctagggagcattgattcttgaagcgtggtcctcagataaacagcatcagcgtctcttgggatcctgtaaacatgcatgtgtttgggtcccactccagacctaccgaatcagaagcctgggagtccagtacagaaataggcatttaaccagccccccagttttaagaaccccctgctgtagcggtcacagggtttctcagcagtggcacattgacacttgggccagagaattctttgccgctgggggcgggggcggtcctgtgtgctgtaggctgctctgcggcagcttcagcctctgcccgctcattgaagcacgtctcccctggctacaaccaaaaatgtcaccagacattgccaaatgccctggggctggggctaggggcacaatgtctccccttactcatcttgaaaaccactgctataaaagaactgggacagctaaagaagccatcatctccaggaaatcctgttgcaggttttccctgaataagggagttagtatcctgaggaatcctccaaaagactgttggcctagtctctcttgatacaggagtttaggagaaatcctaatgcattcagctttcactgtataaaatagttcagatatttcatctccacaaaacttacataaaatcacagagaaaattaagatggtatgggtatgaggggttaccctgaaactgaatctgttttccaactattccagctcttacagacttacctgtaagtaatgtgaattcatatatttcaaagcctgatttcagttttacattgcaattgtagttagagtttcaaaatttcttgttcatactaccaattttgctgtatttctctttagtataagcatattaaaagggaaaaaagcatgtactagcctgcactccgaagtcaagactttagtaaaattaggacgttggtcttgattaacttaattggattgctgaaatctctactgctgattggtaaaaacggcagttagttaattcagcactttcatattgttaaaggagtttgccgcaaaattctcactagcttttaacattttcagaattaataacagtaactttcaaactagaaaaatatctaatattcattgagttcacagatttcaaatatgtttatactgtaagaattagagcatttcattaaaaagttggtattctattggttatcaaattagtaaggaaacatagatcattgaaatattacaaaggcatcatttaatcagtaatttttactacatctcttccaaaaactagaaccagaagtcctgacacctgatttcccatcactagcaattttcctgattcacccacccaggagacaagatttgaatgagcagtaaaaatggccaaagatgagatgaccaaaaaaacagtgataggtctcaaacacagccagagatcaatcaggtgctgctttgattctactagtggttcttaaataaaagtattatattttctacgtcagtggagcatacatacattgtcattggtcttctatgctaatatgtgaagtgaattctacctttgaccttagaatgtatatagatatgatcaagtctttttagtcaactgtcatttgataaaaacaattaagatttagttaattgttgaattaaatggacttaagatattagataagtgggtaattcagagagtaatttttacattttatttagaaaaccttaagtactcaagttgaccaggaggcaccaagtggtataaatacagccagatgtaccagatattcctggagagccctacatttaaatattattctctttcattgtaccagcaattatattaatatatgtcaaaccatttgaccagatttctagtacaaaaatacaatcatgctattttgaaatgaaaagggggctggatttggagccagggtccaggttgtagctctgccgcttgtgacttggtcaagtcagatacctctctgagcctcagtttccacacttctaaatgaaaaataaatcccagtgggtgatgctgcctgttgcgtcatccatgtcatgggttattgtgaggataaaacaaggccgtattctaaagcatttttgcagcagtaaaatggctctgtcttctacaggatacattctacttttaggggtaaattgcatggtattagttaattacatattcctaacggattgtgaactttctcatggttggcattcttgtcatgtcaaaataatgttttgccaggtattatcatcacatacaatagcatttctattggagcaaaataaaaagctcattttttaaagttggcgatacctcacatcctaattagtttcagctgaagataatttcagaaacttcccaggcgctagttcccttgtattaggagggttgctgcagaggtgaaatagttgtatattccagtagctatgtttatttagttcacacattatatgcagtttatctttttttcatttaatcttagtgatagttgtgggtgtaggggtggattttgtttttgttttgttttgtttttaatttcagttctggccaggaatgatggatgaactctccgagttgagagaattctatgatccagatacagtggagctgatgaactggattaagtaagaggattttttttaacttttaaaattttaagtgccttttaagagtcactatagaccacatttcgttttgggggttttttgtttgtttctgaatctaattacgaagaaacattcgtccttactagatttttctttaaaactccatatttgaaaataatgtctttctatttaagaaatattctctccagctatatctcatgaagaaaggaaaatacccatttggagaggaaaaccgattcaataaataaatttcaaaccactgacagaaatggcaataaaagtttataatatctgttgaaacttaaaatttgatgtctctgccaattttatgtttattattttcattttaataccattctgattttccactaatggtgacacttgaaagtattctttctggccgggctcaatggctcacgcctgtaatcccagcactttgggaggctgaggtgggctgatcacccgaggtcaggagttcaagactagcctggccaacatgatgaaaccccgtctgtctctactaaaaatacaaaaattagccaggcatggtggcaggtgcctcctagctactcaggaggctgaggcaggaaaatcacttgaactcgggaggtagaggttgcagtgagtcaagatcgcgctactacacttcatcctgggcgacagagcaagactctctctaaaaaaaaaaaaaaagaaagaaaaaagaaaaaatattctttccttgttttttaaattatactgtaaactccagttaagtagaggctcatgacagctcagtgcggatttcatgttaactcatcatattgccaaagcctaggaccagagaaaattttagatacaaaacctggaactttccgtcttgaatatcataatgctttagtgtcctattggctcttatttctgccggcactttgttgttttgcctcagcattcagcatcagaatgaaatttgtgtatttcaaagctttattaacaaaacctgcctcccaccagcaaaaataaacttttctacccagagcaccattcctatgccctggaacactgtatttccctacttttaaccagaaagcagcagtgtaattattcacatgtaaatagaggctgtgcatcacatgtggtgccttctgaaagcattggctggattgtctgcgtcccatggctaatgcttactcaccagtacaggtcagccctgcgtgtctgcagagatggtcagtgcttgacagctgaggcctccctagggcaacgcatggatctcatagagatttgtctaaaacatacacatggctttggtcctaatgtcggactgggtttgactagatgcagtgagtataatttttcacatatttctggtgctgagagcactaagcgttgctttgtctttatttaattttaaatcatgccagacgattacagagtaaataattccttcagtatttattatgtacaaggaaagagagttattcgtgtaaaggaaagctaattacttttgcattaactatagtcagctggaaatttatgacgtacatctgaagttgaggctgatattttctgttttcaggactatgctgttgaaatcaatgctgaggacccctgctttctggtagcatgctgaaggtggtgggtcttccggatctccttagattagcaccataaacaccccagtctttcaggaattaattataaagtcattaaaaatgtattctagcagagccccaggttatcttcggcagtctcagactagatatatttatttgtagtgcctttatttttatgcttttccccacagaaaattaaaataacatttctggctctgaaaaactggatgagagatgattccaggtgtaaagaagagaatacaagtgtcctatttccctcgtttgggaggtgatgttcactcctcagaccctccttttgctaacagctcgtctccctgtagtgcttttgtagtagacatattcctttggcttttttttttttttttttttttgtaattctcagcaactgaaggatttgccttgttccaaaaaatttgttctattgtgatctagtctcagctttttcccctaaaattcttcaaatctaaataatatttttgtaaaactagctgcttggtatgtttgcaaaataagcataagtggtgatgaatgtatgccaaaatagggtctatgtagacatcaaatatgtttgtttaaatcaacactcaaatccacactggcctgtaggtgtggattccaaactcaagtgactgccttaatattcttttaatctgccctgatttcttctgtttttgaaacgtaaaatatgaccttcaagtttcacctcactgctttgattagtcacacggtatccatgttattagcaagtatgagttgtgctggagaaaaggctgcggcctaaggactctttcagacgcatgggctgtgtctgaaagagtcccaagacgcctggcagagaaccagcactgtccctgagggctgcctctgtcctccccagcctgtcttcctgtctgccctgttcccagacagtcaaagcagacacactcaaatgtctgtcttctgcccatgcaatcatcacggcatctatcggacaggggcacagcctccattaggggagggatggctgtccttgggatgaatcacaactagagaaatagtggcctgtggaaaccctggggacacctcaagtgaccctccattttggcacagggcaccccttacgtgacgtgttgaaaagaagcttatccatcctcttcatcactcacacacctggaagtgtcccgccccgtgtccttgctgctggagtaagccacaccccacatgaggcattacgttgtgctcctggacacagggcttccgcttggagattcaggctttccaagtattctcagagggcttctctgctttaagggtaaattgaaagatgtggttgcctcagtgggagttggttcttttcttttttataggctgaagagatatcctcaagggaaaataaagggccttacctgagggtgacacttaacatgagaagggtcatacccaagggattggattcctgtgaagactcttaaagccttaactaatttataaagttatttcacatctgaagttgtgcacttattaatatagttcagcagatgttcatcgagccccagctgtgtatgggcaccgtgtgaagtgtgtggatgcaggtggcgctccactgcagctgcctttcactggagtaaccgctgggcctcgcctcagcacaattgccctcattcttttctcccgaattctcaccctcgactccattttaagatcttcagtggcttagcaagttcagtgggaaagttttttttagaattctaatttttagtaatagaaaatgttttatgctttcctatctttagctcctaaaaggagtagagattgaagcttcagtatgaaaccaacagtgtttagggattaagttgctcttttttacaaggatggtgtgacatttgacatgttgttaaagtcagggccccaggctgcggtagccccagccgccttccctaagagctgggaggcatgtccagccttccacaccccagcctttgtgcattcacctgcctgctgctctccacgctacaccgatgcattgcatgccttgttttcaagcagaattaaatgcatatattcatatttacccttctctgctgataaggtttcctggatacaaagattaaaaacttggatttttttttttttttttgccttctggtgtctctttcagcaaaagtcaggcggtagttttaaaggttttctgtgcaattagaaagcacgtttacctcagcaaggctgaatgcaaccacaatctgtggtttctaccttgttcctttgtgtccttgaatgtttcatttttcgttcctgaaaattttcttctgacattttgcaaataagataggcatatctatatatttgcatattttgagggatgacattttagctacttcactttaggagattttcactggaaatagtctctttccagtaatgaaacccgtgtgtgcagtattttctcaatgggtctgaaaaaatggaccaactttctttcacatttaaccaaagcagaaagttcgtgtatattttaaatatgatgtaggctaagttcagaccttaaatgcctataagcctcttttctatttaatgaatcattttgtagtatttgcataattctataaatttttgaagtgtagataaagcaaatgttcacacattatattataatgctcagtttccccattagttcaacagcaattaacttgttgaagcttagagcttcaaaaataaatgagattatttgttcaaaatgccatcaggtcttcctggaatgacatttaaattatataatgtaaatccatttgacctgtgagtccttgtcattatttagtgacatttcttacagaacaaattgtgtgcaggttgggcagcctgctatggagcttggcagagagctataaaaacaaattatcctttcattttatacatcatttgttcaaacatttgtaaaaattgctttgtttttctataatagagaaatgtcattcagtggttaaaagcacattagctattttagatacagaccacagactgtatcaggcaagagtgtctgtgaaggaagagcacccagcattatgtccatcactgtgcatgttttcagctaaggacaacggatcccttctccctttgcctgctaaatttaccacaaaatagaaaggacagtgaatataagtatctttttaagtttagaaatgtgtgattgtttgtttctcattttgttccactttgcttgtagcttttcctttggcatttgccttacgggtagagtgaagtattggaagtagcagtgatatttcccaggtttaccacggagctggcgtatgagacaaagccacatggcatggagggaagaagcatcatccctactgtcctcagaagtcagtcattttcaaataagtgttatttttggttttattttatttattttttgagatggaatctctgtcgcccaggctgtagtgcagtggcgtgatctcggctcactgcaaccttcacctcgtgggttcaagcgattctcctgcctcagcctcccaggtagtgggactacaggcaggcgccaccacacctggctaatttgtgtatttttggtagagatggagtttcaccatgttggccaggctggtctcgaactcctgacctcaagcaatctacccacctcagcctcccaaagtgttgagattacaggcgtgagccactgcacccagccagaagtattatttttaattcatcttataggcatgaggatatatgtattttactgctttaaaataaagccaagtcctcagtgaaagagtatgttaacaatccagatgattgtggcactaacacattaaatagattacacttcttttaaactttctgactttttgctaataaggccagacattaagacagtcacaacttaatgagcttcattccattttttctttcattcccctgagcagccatgtgtcactcgctctgctggtgatggccctgctgctgccttggggctgcacctgctaggggccggggatgggagccactcaagagctcttagagcctgctgaggagagagcatcttcagtgactgctgtttcatttccagcttagctgaaggcttgcagtaagcattagtaaatacgtgatacactaggctcactacagcactgggttattttgaagtgtttgtctgtaatgggagctgttaagtaagcttttttctttttttttgagttggagttttgctctgttgcccaggctggagtgcagtggcacgatcttggctcactgcaacttatgcctcccgggttcaagtgattctccctcctcagcctcctgagtagctggcattacaggcacccaccaccacgcctggctaagttttgtatttttagtagagacaggtttcaccatattggccaggctggtctcaggctcctgacctcaagtgatctccccacctggccgtccaaagtgctgggattacagacatgagccaccacacctggtctaagtaagcttcttgaagacaggttgtcataccatgtttgccagcccagcacgtaatagaccctcagcaatattttttgaataaagaacgttataactccctagagggcagtttaggactttgggcatttaagcctttgtgaactctgtaattcatccaagggctatgattatagtccaggaggcaggctgaaaccttaatcattagctgtggctggataacaaggcctgtcatctctgctgtaattataaactgcatgctactatagctttgtgcatcttcttggtgctgaagctgcacagagattcctattatacattcaaaacggtgatggtgagatagtcttgtgattggaatggatgttggaagctcagctgccgggttcgtcttttgtgtagaaggccagcttggcactgttcaggcagtgagactacaaaccaggatcattcgcctctgatagctctcgcctccacctcctgctctgccaggcgtggaaaccagactcatcatgttctctctgcatcctaaatctgtctagttcagaggaccaaagacagccactttttggcatgggtgtgtcaagttatcgtatcgttgattgctgtggaatggctcatgccagttgagagtattcaaaggaaagaagcctggcttggaaaaatggtggcactttaaaaaactaatatttgttcatacttgtttcctttagcaattacactctaggtaagggtagcacagtacacaaggcccagagtaagtgtttagtaagtgtcagttgaattaaactgaatttcagtaaaacctttcactaaggaattctgtgcaccttcacgttttcattgaaaccctcttattcctctgaccatgtgggacagaatgtgagagagtccctgtaaattgttgatacggggaacagagctaacatctatttgttcttgttcctgggtctgtcagaatgacaagctctcaagtgcagccaagctcatgtgaaacttttttcctgctggaatctgcattctagactctggcatgggagaggggatgcatattatgtgtcattatgtatgctcattgtcattccagccactttttttcctcacttaagaacgcttattggaatgcaagtgaatgagagtgtcattgttagaaagaaaatcttgaatttttcaaaagtaaactatttgtaaatgtcacaacttgaattgtgggatgtcttgcttgtagacatccaaggcctctgttggatggcattcacgctggagtcttagcgctgagttggaataaataaaacatcctggtgggatgtatgaatgtgatgaggcttctcttagaaaccgcagcaccagagctagttgcgtgccctgctccaaaaccatggagaacagcctgccatggctttttctgcagaggatgttgaattttaatgattttaaataaactcctcataaccatcttcctcattttagttcagtccagcaggcacagactcctctcaatgcaagaaggataaacgcagcccgcagtgtcctcagtgggcctctgtgggaaattctgcactcaggagaatccccagaagagagctcttagggcctcctgagaaattaactccttgaccgcttacaagtgactctcaggtttccaaaaaaaaaaaaaaaaaaaagaggaaaggaattaaatcagctactaagattccttttttccagggaggaaaaaggaaaaatgcttttcctatattctgggagtcttttcttggtccctagtccctgcccctcacacccctggaagacagaaaatcgtagcgtggtgggaactggaaagtgagtttgtgccttagtattagggtgccccgtgttccttaaactgcatatagtttctcataatcaggaccaaaggtatatgtaaaataattgcgttttcacatcagaagtatttgtgtatcccccatattaagtaataagatattggctatttcagaatcttgtttccatgttttgttgttgttgttgttgttaattctgtttttatttatggtggtatctgtgatttttttccttattgcttttttaagcaaaaacccttggaactgactcatgatcacctgcagtttctggcttgatgatttgttacatgttgctctaggtagctcttttgttaagttcaatacgcaaagcagtggcagtcttttaggttatttttgttagactctgcccctctggaacaatagcaggagaggattgtgggtcttggcctagaagcctggactcaagagctacactgcctgccttctaagacaattccttataaaagtaaacctagcaaaacagtaagaagtttccccaccgttattctggtgaacagtcaaaatcatacaaaacattgttgtaaaaaacatggggctggtgcaaaagtaactgaggtttttgccattgaaagtaatggcaaaaaccgcaattacttttgcactcaatagtttgagtacaaatcaaaaccgaagcaaactcccgttttttttccctgactcgtaacacttggtaacatagctggattcttctgaaaaagtttgatattgtcttctttgttgtctttaaggatctcttaacagtggggttaattcagactctaaaatctttcagctctaacactccaagaaaggctgtgtttgcgggaagcatgcagttgctggccggagtcaagctgtgcacgggaaggaccctaaccaaccacccgcactatgaagacagcagcctgagagagcggaccagagcggtgaggctccccagtgcctcccctcgcttcttgtgggccagctatgggctgcgtgtccctatgtgtggtaaagatggggctgaatgctgcaccctccagcattaggttaggaggatgaattagtctgttttcacgctactgataaaggcatacctgacactgggcaatttacagaagaaagagaggtttaattgacttacagttccacatggctggggaggcctcacaatcatggcagaaggcaaggaagagcaagtcatgtcatacatgggtggcagcaagcaaaaagagagcttgtgcagggaaactcccccttataaaaccatcagatctcatgagatgtattcactaccacgagaacagcacgggaaagacttgcccccatgattcagttacctcccaccaggtccctaccacatcatgtgggacttcaagatgtgatttgggtggggacacagccaaaccatatcagaggggaaatcagaacgtaagtgcacagggctcgcatctcctggtccaggacctctgcctgcccatatccactaaggacgtgccattagaccacaggtcctccccaggtcgggacctctgcctgcccatatccactaaggacgtgaggttaggccacaggtcctccccagggaagaaccgagaagacacacgccttgagatgtgcagaagagcgcatttgggagcaaagcttttggattagggaggggaaggaaaaggcgttgaggcatactggtcacgtttcttatggacctttctgaagtctggggtttttgttttttaatagataataatacagtctcatagttcaaaattcagaacatacaaaaggaaatatggtgaaaagtgcctctcccattattgcagttcttagttcccctcctaggaggcagataatgttagcagtttcttgtgtctccttccacaggtatttcacgcatatacaaatatgcggggagggtggtgcccctttctccatttttacagaagaagtggcattctacattctgcttcttcggcatttaatgtgttttggaaaacattctatattcagtatattaacagcttccttcctatttttaaagctgcttaatattttacatggatgtggcatattttatttagccatttctgctgtttccctgtcttttgtgattatatgaacaatgctgcagataaacttgtctgcacatcactctttccaggcacggtgtctgtctgtacagcagattcttggatggggaagtgctgggtcagggttgttgacatctgtagtgtagatcgagagatgttatcaagtcctctctctacaggttgtatctgtttacattcaagtcagcagtgcaggaaggtgcctgtgttccttcatcctcaccagtcaggtttcaaactcataaatgtttcctaatgtcacttttttcatgttggcggttgaaaagttgttgaaaaagtcttgttttgaggtgagatttgactagcctaaaagcagatgatttttactaatctcctgtcttgtataagaatcatttgaattcagactcctgctaaaataggaattttttgatgggctgaagtgttccagatagttccaaattaactaggaggatgcaggaaaggggctccctggctttccaggcaccaggttcatcaggggtggcctctactgcttggactggagactgcagaaaagacaggtcgagtgcacagaacgtcctgggcatctcctttcctgtctcagtactagggttaggccccacacactgacatcctcaaggccctacggctcttcatcaggaccctggaacccttggaatgccttcagcctgagaccttgtgctggactgtaggacaacacagttgtcacagtaacagcatcctacctccctaccatttcacccatccatgtggacacatcaagttagaccctcaagcccaaatcagaaatctagcactcgaaatcagggtgcaacaaaggaggcagtgcctctcttcatgaacccccacattcaacacctcacacagcctgtttccattccagccccagaatctgggacgctcagtttgcatccatccactgagggtgtgtggcactggtatgaacgtgaagggggcctcctgtggcgttgcccacggtgtgctgcaagtggctctcacccctaggatggacgagagggagaggagcagtggggtctctcaattagctgagatgcggagtagcaggtaaagcagccaatgctgccccagcctaggagcagagaccctacagggatccttctccccacctaccagtttcagaagctggggctctgccttattgggacgtgtgtccctcagactgtcccatcacccttaatgggccattttagtctgggggtcccctttttaaaggtagagactgtgtcttatttactcagccctgtcatttaccttgggaaagcagtcttagaattggtgcctactgatgaatatagtcctgacttgaagtaatacattctgaatccagatgtgttcttcctggctcactctcttcccaaggccgagcactcacagcgttctgggaacttccacgcacacactccaggcctgcaaatgagcgagtgcagcgtggcctgggctggagagagcaccttgggtgttaggtcttagactcagccctgtggaaggttacatcacatagttaactccctggcagtcaagtagcatttgccacattgcatttttatgtctttttgaaggtttatcagatatatgccaagagggcaccagaggaagtgcatgccctcctaaggtccttcggcactgactacgtaatcctggaagacagcatctgctacgagcggaggcaccgccggggctgccgactccgggacctgctggacattgccaacggccacgtgagcatgctgcctctccctgtgtgggggtctcctggaggggcgggactctgatttgaatcctaagaatgtgaatctttttatccttaatgtctagttgaattacgctacgaatcaagtatttgctttttctcttgcttcctacagaagccctctcttggcactttagtgactgccaccggggctgggcaagggagaggtgagaggggagccctgggtccccagtgtcacaccaaacagagcagctctgccttcagctcatttgtatgatggggctctgcataaaatgtatctgtgaaggattttgctgctataaacaaaacctcagcctttaaacccactgctccaacgcttcgtattggctagctgctgcatggcagggatggtggggccctcctgccctccggtctaggtggtggattccccctacccctcctgccctctcctactgagtgtcctgtgtccactggtgtgtttccacaggccggctttcagaggctaagttgcactccagagcagaaaagcagcaagccgcttctcccttctcccttctgaggaaagtgttcttggagctatgccaggtctcagtagagcaaacagattttcaccctttagaggtgtgatgtgtgctgtaattaatggtatgaaagccaatagatatttgtaaacaagttggacaaagtgacaaacctagcctaaatttgaaaaaaaaaaatcttgactgtacagaatttgagattcagatttttgcccgaggagaatcatagttcataactgtcttgagttcagaggtggtacagaccagagacatccatttaaattttgatttgagcgtgactttttcagttatttatttatttatttatttatttttagagacagggtctcactctgtcactcagactggaatgcagtggcgtgatcttggcttactgcagcctcaaccttccaggctcaagtgatcctcccacttcagcctcccaagtagctgggaccacaggcatacatcaccatacccagctaattttgtttattttttgtaaagatggagtctggctatgttgcccagatgagtctcagactcctgatccaagcgatcctcctgcctcagcctcccaaagtgctgggatttcaggcatgagccaccacgcctggcctaaatgtgactttttctgatgagttagagagctttctctgatcactgtagttctctgtatttcatttctatgagagagacagtatagtatgttcctgagagcaagcagacctgagttctagttctggctttcccgttaatgggatcatcgtgtgacgctgcactctccttctcagccttggtctgcacttctgaagggggaaaaggatggccctgatgatctccaggtgcccatggacattgaaataatataatttaatttcactcacataccattcttaaacccaatacccattcctgctcctactgtcttttgtaaatagaattttccccccaaattgtatttgggtttgttttggttttagatgatggatggcccaggagagaatgatcctgatttgaaacctgcagaccaccctcgcttctgtgaagagatcaaaagaaacctgcctccctacgtggcctacttcaccagagtgttccagaacaaaaccttccacgtttacaagctgtccagaaacaagtagcgcagatttctgcccagtgtctatttttgatacggagaaactgcatcatgatgaaactcaatagatgacgtttcctatgtaagtaggtagcccaaaccttcaagctgtgatatgagtaagttctacagatgtttacacaagtgttgccatctttgaaagcatcttctacaagcagaagtctttttcgttgtgtgtctatctttctcattaatgttctttagcctaaatgttaacaactttctaagagtgacctagaattatgttgttggagagaatgatgtgtgttccatggatacctggataggcacataacatgttggaagatgagcacctgctcaggatttgaaatacgtttaattttcaggtgacttaagacagctatgattgaatcaactagagatgatgatcgacttatttaatatgatttcactggtgaagaccaattggtagctttttaaaaagcactttagtgtcctgttttaccttaaaatgttataatattttccagttgtcatgctgtcaacattaacaaaaaaaatcatgttaaggctttgtatcaaacattttgttacactctgtctgaaatgtaatgtggagtacttcagcagtatgtgtcatgtattgtgtgtgtctgtgtgtgtgcatgtgcacacatgtgttttaatgctgggcacagaaaagtgttacaagttccatatcgtaagtccttaaaggggcagaaatatatgtagccaagtagaatttattacattttagtgttattattttaaaacttactgatactctttaacctctcctgcagtaatagttttgctttatttcttactcatttcaatttattgggtttgcaaaattttgtaaactttttgtgtttttagcctttgtattttttacagcctagaatcttgcaaagtctgaatattttttaaatgttctatcttaactagttcactaatacagtatttttagcagacagcattttcagacagcattttcataccaagtttgacttgtggtctccaatcttactgggaaggccctggtagtgtaattcttttccttattaaaaggtaaccaagtgcctctaagtcatgcttatttgtaaacaacaaagaagagtatatgtacctgctcaaaatttttttgataatcgcttatataattaatttctaatgatgaggacatgtaaaagttgccagtaagaacatagtatgcatttaattaaatcaagatggctaatggaattaactttctcccctgttcttgccaggtggaaatgatttaagcatttctccttgcagttgtattgaagtaaattaccataggcatcaagatggctgcatcacattttcaaatgattttatattcagttgctacttataaagcagcattcaaaaagtcttttacactgtcatgttggacacaagcagactcagcttttatcaaaacttgtttaaataaaaaattgacagtagctgggttattaaattatgcaactgaaactcctgaattatatcttttctgtatcccttaataagattggagaccactgccgtttaggataatacaataataaaacgttttaatcagtactaaaactttaattaagccaataatgatgcatgcctgttgtagctgacagcatgggtcagtacatccttcagcgagtgccttactctaattgaaaccaagcacacgtaaggtacaatatgttagactctgtgattttgttttcaaaatcctctgttatggctatatttaaatttattttaaatattcctgtatgtattcatctaagcatttgggcatttggagtcttaatatacaagaaacacgtacttaaatttttatgcttatcaccgcaatgatggcaaacagtgattttttttttcatagtttaggtgtcattgttgccagcacctttagtgctcagtcttcagtgaaaaatataaagtgccaaaaaaatcttgcaagacagaatccatacttaacactctttccaagacactgtgaccatgtacagtagctatttcctgatgaccaaatctctcaacgaatcatgttattaataaatatttttagcactcatcagtattctccaatgtgaccttctcattggagtacacagaaggaaagcaaagaagagcatctgacttctagctctggcttacagcctctctaccaggccgaagcaagagacccgcggcagcagctccccgccactcagacctgggtggtgataacctcaaagaatggctctgttttctattgacagaaaacccacttgattttgcttctgagttagcagtcagaagaccctctaagtacaatagaagtgctcttaacggactctgcctgtgtgactcccaggccccggagtctccatctctctcgtaagccacctgccacagcacagctggaggctgttctctggtgttctcagcgctccggctccctccctggagttgtgcacccgtcccaaactcctccatgcaagttctgcttcctcttataagtacacaactcagttaagtattcacatacacacagaaaatacgggtgtgaaaagaaagaattttctgtaaaaattaagttgaatactttggtaaaaagtgataaaggctgagttgccaataaaagttgcttttaaattaggtgtggctgggaatattataagatattggggaaaatatacaaatcaagaaaatttctgagcttagattgcttcatagatttatttaagtactcatcccacctttaaaacctctaaactgagaagaagggacccaaatcatgttattggtgtgatttatgtgagaagtagaactgtagtcattggacccttaggcaaaggaaaatccgtgtctttatatcagaagatcggcaaacgaatgtatattacacagtttaggttatgattccctactttaacctacttactttattaaatgaccaactactgatactgatcacaatagttattagagattctaatttagttggaaggttctaatcactttcattacaggcatttgaaaaatagggattcatttcgaatatattagccaggagcatagttagatgttacccaggccatttatcatcctgttaatgatgattttcccgacccttgtgagatcagcgtgacaggagtgtgtgtgtgtgtgtgtgtttctgtgggtgtgtggttttggttgggtgctgccaggtggcaaaggcatatgtaaatacatctgatctgcatctttatttcacagttaactaaaagtaaaaatgtctattctgattccatattgattttgtctaagatgtaaaaatttgagttcatctttggccaaaacctacctgaattaacatacaaaatatttgatttttaaaatttaattcaaatctcaaaatcaattaagtattctcagatcctatatcttggttaatatgctcccagatactttaaacatggcaaccttttggcctaagagaatgtttgttcatggaaaaaagcttttgagatgagagggtgtcttactttcttgtggcaattgattttctgttttaacaccctttgggtaaaatcttgcaaagagcttttataatttgttttactgaattgtatggagattgtataccaagtaaagctcttttaaattacataagatgagtgtcttgcatttctttgaaggtcaaagcccaaggaacctgcttgttgaagtgcattaaatatttgctaaatagagtaaatcactaaaggttagtgtgtctactaaaaatacaaaaaattagccgggcatggtggcgagcgcttgtagtcccagctactcaggaggctaaggcagaagaatggtgtgaacccgggaagtggagcttgcagtgagccgagatcccaccactgcactccagcctggccgacagagcgagactctgtcttttaaaaaaaaaaagagtttttcacctagattaagtcagacccacccaatataatctccatttttgttagctcaattgtaattgttagcttaattgtgattgttattgttgagggtgtttattttttagaatggaatttggtttgacagctgcttatttgtttcacttgaattccaaggttatagtttagatttataaggagaagactactatcagcagaatttatccttgaagagataaatgctagtttgacctcaagaacagtttctacttgattaaattctgagtctttagtaattcaggaagatgggtggtagtgcacctgcttggttggagtgtatagataacaaatgtttggactgttatgttcaaagcagaagttgaaatttcaagcaaaaatggtcagacaaaatggaaaaaaactggcagtgaggtctcaaatattctgtactgacaggtggtccctagcaaaataagaataataatatagataagcaggagatgtgggatatgaatgaactgacatggaatgggctgacatggacaccaggcacttgacagatgaaatgttttttttctctgcccctcctttcagataaggtgtctgaaactcatttcataaaccttttcgttattatttagaagtttgctttataagattgtttttcaaaatgcagataatagaactatagtataatgtgaagtcaatttcatgggttacaaccaacatttaaaaggaaaggagggagggagggaaggaggaggacagcctaatgttaaatataagtgctgttttgtggattatctattccagttataggtattcatttttggggggtacaatataaaatatatttcttccgtgagttatagtcaggctgaaagccaggcctttattagctgagggattctgggaggatggcagcttgaacttacctgtgtccttgccctctgtgctagcagaactgtctgaatgaacactggtgatattaaagaactagcataatgatagagaatggctgggctcccggctaaaccccacccttaagcctggaaccctggccctaagtgaaaacagctgaccctgtttttctgcccaaatgttgccttttggggctgccatgcccctatcctgtgcccataaaaagacttcaggtggcagagcaacacaagcagctgaacagcagggatacaagctgccaactggcgggaatacaagcaactgagcagcagagactacagatagacccagctaacttcagatgtggcttcagggaaagatcaccttcccacaccatcccctttccaactcccatcctactgagagccacttatatcacccaataaaatcctccacatatactacccttcagtccattcatgtgacctgattgttcctggatgccagacaaggacccaggtgccaggagggcaggggcttggatgctgctgtggggcccagcagagcctgcctcctgccaaagaggagcaactgtcctgttccagccttccttctctccggttcctgcactcacttgctcgcatactccctctcatgaggagcagccagcagcaggctgagtgaaacagccactccagttttcacccatgaaggggttcccttgaagggaacagtcccatctcaataattcttatatgtgatatggacattttcttaagtttcttaagtttctttaaggttcttaagtttctttttaaagtccttatattttaaaatatatactgaaatatttacagacaagtatatgtctaggatttgtgtcaaaattttgtggggcatctagatgaaacaaattaacaatgaaaagatatggcttaagctagtttggaatttttatatagtgaaaagagagaaattagacccaacgaaacagactgaaactaggaacaaaactaggaagataaaatttaggagatagctgaaatcaatcaatgcaacaaatagtagaaaggataaataaattcaaaattcagttattttaaaataaagcagttaaacactgggccaacctgattaagacaaaatagcaaaaatatacaacagtagaaatgtaaaatatataattccagaatcagggataataataattatatgaggataacatatgcaattctgtaacaaaaataacctataggaaatgggtgactttctaacaaaatagaaaatgtcaatgtggcctgaaaaagaagttgaaaacttgaatagacaaaacccatgaaagttctggcatggggttcaaaggttgcaaaggacatttggacaagaagggtgcacagccagattctttctcactcttaaaggggatgactcccaagttcacctagtctcagccatagaatagggagaaccccaagttttaggaaagctagtccaactttaacaacaaaataacacagagagtgtatcagttttctattactacataacaaatcaccacaaactttgcagcttgaaacaacacacatctattatctcaaggttttgtggatcaggagctgaagcacaggttagctgggtcctctcctgtctcacaaggctgcaatcaaggtatcagccgggctgctttctcatctggagttacaggacctcttccaagttcacgcaagcttgtggcaaaattaaattccttatgcctgtgagactgaagccattagctcctagaggccacccctctctaggcgattcacagcatggccgttagcctcttcaaggccatcagaaagcatttctccagttactgttttaagagtttttcggccgggcgtgatggctcacgcctgtaatccagcactttgggaggccgaggcggatggatcacaaggtcaggagattgagaccatcctggctaacatggcgaaaccccatctctactaaaaatacaaaaaattagccaggcatggtggtgggtgcctgtagtcccagctactcaggaagctgaggcaggacaatggcatgaacccgggaggtggagcttgtagtgagctgagatcgcaccactgcactccaacctgggcaacagagcgagactccgtctcaaaaaaaaaaaaaacaaaaagtttttcacctggattaagtcagacccacccaatataatctccatttttgttagctcaaaatcagcttgtttgtgacctgaattacatctgcagaatcctttcgcttttgctatatagcctcgcctaattacctaaataggagtggcatttatattcataggctcatccacacttaaggggaagggctctgcagggcatgttgttcaggcagtgggaatcttgggggccatcttagaattcttcctaccacagacagtttaaaagaacagggtctgggccaggcatggtatctcacgcctgtaatcccagtgctttgggaggccaaggcagaatgatcacttgaggtcaggagttcaagattagcctgggcaacataacaagaccccatctctacaaaatatatttttttcaaattagccatgagtgatggcacacacctgtagtcccagttactcaggaggctgaggtgggaggatcccttgagcctaggcgtttgaggcagcagtgagctatgattgcatcactgcactccagcctgggcaacagagcaagaccttgtctcttaaaaaaaatgtaaaaataaaagaatagggcctggcgataactgagtggcaatggttaacatagggcttttgtaaactttgacagaaaggagaaacacaaggtgaatcccagggttacccaggctttctcccttagaggattttccaaactgtggcacaggaaaatggagcccaagcagagtatgtcaggctttctggaggaagcagattggagttgatagctgctgaggtggctggggtttggcaggggttggaggggcagagcaccagagaggagggagttggaataaagaaaacctaagaatttcccattgggtccttggtcagttcctagcctgcagaggcttagcagagaacatctggtcagtggcagagctgaacagaaatttcagaggttacacaatcccgaggagacactggaatttgggtccagctggggctgagagaccacggtcaatctcccaggcattcagctgagactctggagagactataccttatcctgggagtagaggctgttatcccaattgcctgccagaaacaaatgtaaatctgctatgaaggatgatagccttattcatggcttcaaattgtctttacactttttatatacacaatgtagcactcaataaaataatcaggaataattttttaaaactgagaccaagtgtggtggctcacacctgtcatcccagcactttgggaggtcgagaagggaggatcacttgagcccaggaatttgacagcagcctggacaacaaggcgaaactctgtgtctacaaaaaatacaaaaactggccgggcgcggtggctcacgcctgtaatcccagcactttgggaggccaaggcgggcggatcacgaggtcaggagatcgagaccatcccggctaaaacagtgaaaccccgtctctactaaaaatacaaaaaattagccgggcgtagtggcgggcgcctgtagtcccagctacttgggaggctgaggcaggagaatggcgtgaacccgggaggcggagcttgcagtgagccgagatcccgccactgcactccagcctgggcgacagagcgagactccgtctcaaaaaaaaaaaaaatacaaaaacttacgtgtggtggcatgcgcctgtaatcccagctactcaggaggctgaggtgtgagaatcacctgagcctgggatatcaaggctgcagtgagccatgatcatgtcactatactccagcctggtgacaagagtgagagcctgtctcaaaaaaacaaaaacaaaaaacatgactgaaacagaattgaagtagaaacagtgccacaggcaaatcaaatattgcagcctgaagcatagactttaaaataactatgtttatcatatttaagactttaaatgacaagaaggagaatttaggtgaataactgaaaactttataaaagcaaaatggaaatgctagaactgaaaaatgcaatgaattaagtgttcactgttgggttagacacagctgaagagagttgatcaactggacaataggttagaagaaaatatccagactaaaatattgtgggctggggagaagttgaaaaacaaaggaaaggctgtgtgtggtgactcacacctataatcccagcactttgagaggccaaggcaggatcggttgggcctcaggagtttgagaccagcctgggcaacatagtgagacccgttttttttgttttgttttgtgtcgtgttatgttgttttgagatggagtctcgctctgttgccaggctggagtgcagtggcaagatcttggctcactgcaacctccgcctcctgggttcaagtgattctcctgcctcagcctcccgagtagctgagactacagctgcccaccatgcccagctaatttttgcatttttagtagagacagggtttcaccatattggccaggatggtctcgatctcttgacttcatgatctgcccgccttggcctcccaaagtgctgggattacaggcgtgagccaccgcacccagccctgtttttatttaaaaagaaaaaggagagcatggagtatattttggtatattttatgccattctataagtggtactggagtcccacaaggagaggaaatagaatgggcctgtatgactttgggcatgctactcatattcttagcttcatgtcttcttttgtaaatggaggtgtaatcataatatacctattggtttgtggggtggattaaatgagataacatttcaagcactaggcccaatatctagcacatggtaagtacattagatgaaagctgcaggattattatcacagtcgtcttcaaaattagaatgtgaaagagaaaagcatgaagagcaaagttacaggtgagtctgacagatactaaagagcccttagtaattttatgttaactattcttgctgtagaaaatatctttaaaagcaaaaagaaaaaaaaaaagaaaacttcaaggactgaggaggagattaagagaacagttttatagataaattagtttcttagtaattcctgaggtgtgtatttgcaacacaaggaaatggatttgtgtttgtgtctctgtgcgggtgaggaagagagacagaaaaatagagccatggacaaagaccaagagagactgattgattggatgttcttagaggagacattatcattgttgaagataaatgccaaagccctgccaaggtgcacatattcataaagaagtagaaggggctgattgtgcgtgaatctgcttaagaaagggaaaggagtgaaggaacatgatttcaggactagcccggtaattagaactgcagtgagctaattaaggctcataaatttaatgaaactattagcattttctcttgcaagaaaaggtatatgttttctctcaggaaatgacacctgtgaacaattatctctcatttctattaagattatttacataagttttgctcatttggcactcactgctgttaattattattttttattttttacaacacctgatatcacactagattcactctgtaggaaggtgctttgggggttactgataattaatagtttagcacaaatagacaagaccattgttaggggacctgctgtactgttactgtgctgtctttgtgggcagcctttttgtttaatagaaaatgtttcagaatctttgaatatctgtaagagcctggtagattatgaaaattatgaacacaacctttcctaggccatcatgtaactcaatggtttcttcagtgagaacttcctgagtacctactgtatgccagaggaagaggtgagaaaagggcgtgaggataggtttatgatataaacatgaattcaaaatatcctattattgcactgaattgaaatggatatgatgacctctaagggaaagccaagggtgtatcatttaggaaatttcaaattgcaagtgtaaaccaaaagtatctgagataagtcttcatttagaaagtttattttgccaatgttaaggacacaccatgacacacagcctcagaaggtcctgatgacatgtacccaaggtggtcggggtgcagcttagctttatacactttatggagacacgagacatcagtcagtacatgtaagatgtacactggttgagtccagaaaggtgggacaactcaaagtggggggctcccaggtcataggtagatttagagatttttctgattgacagaaagagttactgtcaatagaaaggagtgtctgagttacagtaagggactgtggagtccaaggttttatcatgcagatgaagcctctaggtagcaggcttcagagaaagtagattgtaaatgtttcttatcagacttaaagagtctgttctatccataattcccaaagtacggagggtgtaatgaagcatgtctagttcccccttcccatcatggcctgaactagcttttcaggttaacttcagaatgcctttggccgaaagaggggtccattcaggtggttggggggccttagaattttatgtttgatttacacaagtttcggaaaacctaacccaagttgtcttacataaagggaatgttttagcacatttaacttttttaggcctttaggtaaggcttaatctgatatcctagtaattagatttattcaattaatatttgttgagacctaaaaggccttgggaatacattagtgtctaagacattccgtattctcattgagcttacattttagtagaggatacagacaacagataaaaaaataacagaaaacatccaaatgttttaagagaaatgaaagtgctatgatagagtatgagtgggtggctccttgggtttgggtgctcagaaagccttcttggaggagatgtttaggctaaaatttcaatgactacacccagaagaatcacgctatactaagattggagggaagaaggctccaggccgctgagccagtatcacaaagtcctgggcagaaaggagcttggtgcgcctgtcagatgcagcacacaggagaggagagagtaggagaaggatgcagaaggcagaccacacatgccaccatgaagaagttgaatttgttcccagatgtgattcaaaaatggaggattttgagcagggtagtgacattatctcatttgtgtttcaaacagcatgtctgtgaatactgtatttttctattgctgccatatcaagtgaccaaaaacatgcagcttaaaacatcacaaacgtggtctccagttttgtaatcagaagtccaggtagagcaggaagtgactgtgtcctctgcacagaatccaggaagatgaaacctaggcttccttctggaagctccagggatgagtctgtttccaggctcattcagttgaagaaccagggttctcatttcttggctggctctcagctagggaccacccttagctcctcaagaggttcttgctccatagccctctacatctcaagaccaccagcagggtgtcaagcttcacactgccacattccttctgtctcttctctgccgcatcttcttgacttcagctgggaaagagtctccacttttaaggactggtgtgtgttagattggaaccaccagataatagaagataatctccctcatctcaaggttcataattgtcatcacatttgcaaaggccctttggccaaggagcatgacatattcacaggtcctagagattaggaagtggacatttcctagaaattaggaagtggacatttcagagcagggtggcattaatcagccaaccacagatgctgggtggaaatcagatgtgtgggtgaggtatgcgatcagaagcagggagaccagagatcaggaaatttcggtagtccaagtgcaacgttatggtgtttgggaacagaatagtaggtaggggtagagaaaggaggtagggctgacaggacttgctggtattgtaacaacgtaagtggaaccggagatcattatgttaagtgaactaagccaggcacagaaagacagacatcacatgttctcacttacttgtgagagctaaaaattaaaataagtgaactcatggagatagtagaaggatggttacccaaggctgggaagagtagttggggagtggaggggaagtggatggttaatgagtaccaaaatcatgagtaacacctagtgtttgctagcacaacagtgcaactgtagtcaaaaataattgaattgtacattttaattgtgcatttaattgtacatactaaaagtataattggaatgtttgtaagacaaaggtgtattattctgttctcacgctgctaataaagacatacctgagactgggaaatttataaagaaaaaggttcagtggactcatagttccacgtggctggggaggcttcacaatcacagcggaacattaaagaagagcaaaggcatgttttccatggcggcagagaagagagctcgtgcaggggaattcccatttatgaaaccatcagatctcgtgagacttactaccacaagaacggtatgggagaaaccacccccaggattcaattatctccacctggccccacccttgacacatggggattattacagttcaaggtgagatttgggtggggacacagctataccatatcaaaaggataaattcttgaggtgccagataacgccatttactctgatataattatgcattgcatggcggaatcaaaagatctcatgtaacccatgaatatatatacctactacatacccacaaaaattaaaaataaatttaaaaaaaagacttgctggcagattagacattaggaataagagaaagactatgaggaacaacaaatttttttcttggcttgcataacttggtgtataatggtgccttttcttgatttctcttttttttaatgaacctaacattatgaacataaaaggatgccttttcttgagatggagaagagtatgtggtattggtgttcaacaaatactctggttctcccctcttctcggccccttttcgcctacgtggggccttatgacttgttcttgacaatgagatatgtcatttctgggtcacaacattcaacttcccttgcaaaatcctccagaactctctccccagtggtggctgctgctgtgtccatctgggtcctggaataaggatggtgaggagcagagatttctcgccaacttgcattcaagttgtactgtaagaaataaacctgtgttgttttaagtcactgagatttgggggttgtttgttattgccccacagcttcacctattctgacctgacatactgggggaggagcaggaaaaaagaattgtgaattggccatgtgaagtttaaggtgctttttcagtggtgttccaggtctcaggcctctctgcccactgcactgctgtgccgtgaggagtgtaaacatattccaccccattcttgcagacccgctcctggttctagaatagccgcccactgctctcaaggtctgtatgtttcctggtccaagttcagagcggggaaagtgtacctccaagatagctcaaagggccagtactggagcctttttgacctggcttggttcatgtgcccatcgtagagccaaccactgtgaccaggggcatgggttcagtagatgacttggaccagtcagtttctatctctggagttggaatgtggaaacaatcacacgtaaatcacctggctaggaaagccagagtactactgggaagggagatgctgggaatacatgtccagtacaaggaaaaagacatcttcaggttcctgcggcaaatctggcactgcccttggcactttgtgtggtcttacctgtagggtccagccctacggggcttagcgggtgttctccccgtgtgcggagacgagagattgtagaaaagtaaagacacaagacaaagagttaaagagaaaacagctgggtccaggggaccactaccaccaagacgcggagaccggtagtggccctgaatggctgggcgcgctgatatttattgcatagaagacaagggggcagtgtaaggagggtgagtcgtccaagtgattgataaggtcaagcaactcacctgatcatgggacggggcccttcccttttaggtagccaaagcagagagggaaggcagcgtacgtcagcgttttcttctatttacttgtaagaaagatcaaagtctgtaagactttcactgtttcttctactcctgtctactaagaacttcaaagaggaaccaggagtatgggaggaacatgaaagtggacaagcagcgtgaccactgaagcacagcaccacagagaggagtttatgcagccggatgactgtgggagggcctggataatatctagcctcccacaagaagcttgtggagcagagtgttccctgactctaaggaaaggagactccctttcacgttctgcaaagtaacaggtgccttcccaggcactggcgttaccgcttgaccaaggagccctcaagcggcccttatgcgggcatgacagagggctcacctcttgccttccaggtcacttctcacaatgtcccttcagcacctgacgctatacccaccggttattccttggttatattagtaatacaacaaagagtaatattaaaagctaatgattaataatgtctatactactgattgataatgtccatgatcatctctatagctaatttgtattataactattcttattctaactattttatttattatactgaaacagtttgtgccttcagtctcttgcctcagcacctaggtaatccttcacccacacttaccagtattcccatccttcagggaaccattgcaaacactgataatgtggctagaattgacaagaatgtctcccatgtaacctttaaccaccgtcagatttattttgacaaacatttttcccatacaagcaatgaaaataataagtaacttttttttttttttgccagtgcctcaactacagtaattagccatgtagagaggtgcctaaagaccctacagtcagctcatttgtgtcaggtatgttacctttgaaaccatgccccaaagagttaactaaaaccaatgactgactgaaattcttgagcttgcaagatggcagataagaagaaaaacaatttgctgaaacgctgaaactccctccacttgtaagataacaaaactggcagaaatcagttggaccaatattgccaattgcaatctgcactgaaggagcttgtggacatcacagcctacgtttccactgtacatttcttactaactcaccgcagacttgtacatgagacccgtgagggggcatggagagataactgcagttaaagtcctgtgcaaggactttccagacctcccccttcgttccaccaatctcctgctaatcccagaacccagccactaaaccttttctaataaaagtacggcctaaaagccagcacagagtcagatttgagctgaacacctgtctccctgttggtcgacccataacagaaagcttttctttagtcagaaataatggtgtcatcatattggcttctagcgcatagagcagccagcccttctgctcagtaacaccttccttgcccacatcctcttattagagagctagctgagaccacattcatgacccctgcccacagccagctgcccatgtttgtcttacccagggtgaaccatcattcttctctgtgtatttggaaatgtgattcagagattctaattggtctccagtggcaacttgaatcgtgaagacatgaggctagagcagctatgtgcacactaagaagacagccagcctgcagcctgccatgaagcaaacacgaacagtagccatgagaggccaggtgcccccaaggaggcaggcagaggaaacctggggtgtggactcccagggcccacgtgtaagtccctcccaaggctcaccctcattcattgttcctgggtttcatgaagctcctggttacctttcagacgaatgacttctctgacctgggctaaggcaagaacaccttccttataactaagtcgtccccaatgaagaccctaaagaattctcatgagtctgcttttcttgaggcagacaccttttttgtaatgctctttcataacaccaattccaaacagttaaaatggtacttctcaccctgaattctggttaattacatatgcttctgcccttctcacagtgctttgaaattcttgaaggcagaaacttttttttccccacctttaaatccccagtggattcttggagtgagtgtgtatcaagggtttgtggccctggattctgcaggtgaggtcagggtcagatgacagtgatactcagtgaactataattagtgtcttccttccaaggagagaaacagaatgagagcgtggactgtgatgcctggcgagataacttccctgcctactacttttcaaagaaactgacctacctatacatccccaaaagaatatatgaatatgaaaactccactaaaaatatccaggcattcaagtcaacagccaaaaaaaaggcagggggaatagtgacagaatacaaagatagaacgtgtccacttaaaaacaatgtctaccatgtcagtgtcaggtgcagtgctctgatatttattggtagaccaaatataattttgctgttcagatcttcaatatgtatagaattatttctgtgtttctttcttctgttagaggttgagaggcgtttgactctcccactgtgattgtggatttgtctctttctcagtttattttattttatttcaagacggaattccactctgtcacccaggctggagtgcagtagtgtgaacttggctcactgcaacctctgcctcctgggttcaagcgattcacttgcctcagcctcccgagtagctgggattacaggcacacaccaccatgccaggctaatctttttgtatttttagtagagatggggttttgccatgttgaccaggctgatctcgaactcctgacctcaggtggtctgcccaccttggtctcccaaagttctgggactacaggcatgagccattacgcccaccctcagtttagtcctgttaatttgctttatatattttgaaactgtgcagttgggtacatcagtatttagaattgctaacatttgcagggggactgttctctttaaacatctatgaaatgcccacttaatttctaagcagtgcttctgagctaattttgttcaataccaatgtagtctaccagttggtatatatatatatttgtgaccttcttctttgaacctttctgtattcctgtatttatgatatgcttttatatagttagggggttttttttgcctccatttttactcttttttttttttttggagacagtcttactctgttgcccaggctggagtgcagtggcgcgatcttggctcactacaacctctgcctcccaggttcaagtgattctcctgcctcagccttccaagtagctgagattacaggcatgcatcaccatgcctggcaaatttttgtatttttagcagagacagagtttcactatgttggccaggctggtctcaaacttctgacctcaggcgatccacccacatcggcctcccaaagtgctgggattacagacgtgagccactgtgcctggcccattttttctttttaataaaagtctttaggccaggcacagtggctcatgcctataatcccagcactttgggaggccgaggccaaaggatcacttgaggccaggagtttgagaccccccaccaagcaatgtagtgagactcatctctacaaaaaaataaaaattaaaaattagccgggcatggtggcacatgcccatggtcccagctactagggaggctggggtgggaggatcacttgaacccaggagttcgagactacaatgagctatgatcccaccactgcactctatcctgagtgacagatggagaccctgtctctaacaacacaaaaaagtttttagtctgtttagaatttaatttaatcactgacagatacattggagtctacatacactgtctcactgttagttttctatttgacctgttttatattcagttcacccctctgtaagcttacatactctttaatatttttttctgattttatgttgaaatggtgtcgaatttatagaaaagttataagaattataaaaagaacccagattcactgatttttaacatatgaccatattggctttatcattctctcagcagattgatagttacaggaaaacatttattattatttcttctgaattatttaggtatatgctgcatatatcataccactatgcccttaatttttcagtgattatttcctaagaataagggtattcctttatataaccacaattattttaccaaatttaggaactttaacatcaacatgtaataatctatagatctaatgatgtaatctaatgatatatatctaatttataatatatattctaatgtagttaattgcccacaaaatgtttattatagcaattatttttccagtagagaatccattttggaattgcatttagttgtcaaatctttttttttttttttttttttgagacagagtcttctgtcgcccaggctggagtgcagtggcacgatcttggctaactgcaacctcttcctgagttcaagcaattctcctgcctcagcctcccgagtaactgggatagcaggcacgcatcaccactcacccctgtaattccagcactttgggaggccaaggcgggcggaccagttgaggtcagcagttcgagaccagcctggccaacatggtgaaatctctctctactaaaaatacaagtcttttaagtctcccttaatctggaacagttcctcaacctttctttgtctttcctgaaatttgtatatttgaagaatacagaccagttattgtatagaatctgctacattcccgactggactgctacataaatgatactgtgtcctcaggtatcacacctggaggcccataatattcatgttcccttattcaatgatactttttttgtttttgagatggagttttgctgttgtcacccagtctggagtgcattggtgcaatctcagctcactgcaacctcttcctcccgggttcaagcgattctcctgcttcagtctcccaagtagctgggattacaggcatgcaccaccacgcctggctaatttttctatttttagtagagactgggtttcactatgttagccaggctggtctcgaactcctggcctcaagtgatccacccatctcagcctcccaaagtgctgggattataggcgtgagccaccaagcccagcttcaattgttatttgaactaattatttgtccttccttttaatcgtggttgttactcttgtgaaatagagttgagtttattggtttcagttggcatttagagtttttccccatgtatactgatctaattttatttatttatttttactatttaggacattaacatcatgtaagagtgaaaacaataaaaaagactcaaagaatgttgctccttcctcattcctgctatctcatcctgctcctcttgtacagaatcccttcttttttttttttcgctctgtctcccaggctgcagtgcagtggtgcaatcttggctcactgcaagctccgtcccctgggtccaagcgattctcctgccccgagcctcctgaataagctgggactacaggcgcctgccatcacaaatggctaatttttgtatttttagtagagactgggtttcactatgttagccaggctgatcttgaactcctggcctcaagtgatccacccgtctcagcctcccaaagtgctgggattacaggcatgagccaccatgaccagccatatataatcctttttattcatttctgatttacccattctttgtttctttttgcaaaaatccgctgatatgcatgttttattatttttttattatattattttccatttttctttacacaaaatgaatatattcttttgcactttttactttttgataatataattatatattatataacttatatagttatatataatcatatgtaacatatatgattatatcatatatgacatatgaatatataatcatatataacatataaatcatatgtaacatgattatataaataatatataacatgatttatttaatatgtaacatacagttatatataatcatgtaattatactataattataatcataatatgttataccataatatatatattatatatgtaacaatatagtataattaaattattatatcttacatactatgcaataacatactatagtatataactataatatatagtatagtatagtatatagtatagtatgttataccataatatatatattatatatgtaacataatatagtagagttaaattattatatcttacatactataacatatatagtatacactatactataacatatacagtatagactatactataacatatatagtatagactataacatatatagtatataactatactatatagtatagtatagtatatagtatagtatatagtatagtatgttataccataatatatatattatatatgtaacataatatagtatagttaaattattataatatatcttacatactatactataacatatatagtatataactatactatatagtatagtataacatatatagtatataactatactatatagtatagtatagttatatagtatataactatactataacataatatagtatagttaaattattatatattagcattccatgtgggtccataaatacactgttgtacagatgttatgcccattaacaattattgatatgattgatctcaatgctctcacattgttctaattacagcgtgtattatatttaccctgtttctctatatgatgtataagtatctcacattctacaattattttttatattttggaagcctcatattttgtttcactgattaccttatttatacctttgatgttcttcattcagcataaacaagaaagctcatctgttatctactcaacaatcatcggtcatagtctacttttctccttctccattctgctccaatttttagttgcattctttccactttgtcagaaaatattccgtttacatactatttctccaccatgtctccacttgttgtaagtgtctcataattacctgaagtgatagagcatcatttctaggtactttgtattaaagatggatctttattataaactcacagcctctctctgtccctctccctgcctttctctttttctctcggcatttgtgcatgaaatatatattaaacaaagtacagctgcacaattaaaaagaaagaaaaaagaaacaacatatgggataaatggaaaagaaagagcaacatagaacatctagaattaaacttatcaataattatattaaatgcaatgatcaaaactacgattaaaaggcagatatcatcacattggatacaaagcaaaactttaaagaagcacactttgaataaaaaggcatgggcaggtttaaaataagtaggtgccgggcacagtggctcacgcctgtaatcccagcactttgggaggccaaggggggtgtatgacctgaggtaggagtttaagaccagcctgaccaacatgatgaaatcccatgtctactaaaaattcaaaattagctgggcatggtagtgcatgcgtgtagtcccagctactcaggaggctgaggcaggagaatcatttgaacctgggaggcagaggttgcagtgagccaagatcacaccattgcactccagcctggacaacagagcaagactccatcttaaataaataaataaataaataaaataagtgatgacactaacagtacaggcaacaaaagaaaaaaacaaattggactgcatgaaaatttaacattttgtacattgaaagacactatcagtagtaaaaaagcaaccccacagaatggaaggaaatattttcaaatcatacatctgataagggattaatatccagaatatatagagaactaaaatgaagaaaaaaaattcaaaaatgagcaaaggacttgaatagacatttctccaaagaagatctacaaatgacctacaagcatgtaaaaagatactcaacatcactaatctttagggaaatgcaaatcaaaactacagtgagataccacctcacacccattaggatggctactttcaaaacaaaacaaaacaaaaaaccacacacacacacagaaaataacaagtgttggtgaggttgtggagaaactggaactcttttgcaatgttggtgggaatgtaaaatggtgcagccagtacagacagcagtatgacagttcctcaaaaaattaagcaatgaatttcagcaatgaatgggtacttctgggtaatacccccccaaatagaaagcaagattgcaaagagatatttatacacccatgtttacagcagcattgtttatagcagctacaatgtggaagcaatagtatccatcaacaaatgaatggaaaagcaaaatgtgatatattgatacaatggaatattactcagcctcaacaaggaaggaaattccgcagtatactgcaacatggatgaaccttaaggacattatgctaagtgaaataaaccagtcacagaaagacaaatactgtatgattcaacttatatgaagtacatagaatagtgaaaatcatagagatgggaagtagagtggtggttgccaggggatggcaggggttgagggtggagggaaacaggagtgattgtttaattggtatatagtttcagttccgcaagatgaaaagtgttatggagatggatgttggtgatggttgtacaacattatgagtgtatttacactgaactgtacacttaaaaatggttaaaatggtaaatgttatgtgtattttaccaaaatttaaaaattgggggaaaatagatgaaaacagacactaatccattccccatctaacactaacataatctctcccactaacactaatcacaaaaatctgcagtggctatatgaatgtcagcagagtggatttagcaataataattattaccagggataaagagggatatttcacgataataaatgagtcagtttatcagaacaacaatcctacatttagttgaccctgacaaatttttgtttcatttatattaaagctttgatactttgattctaatttaacataattgaaaggatagattaacccacaaatacaggtaaagatcacaatacccttctcattaattgattaaacaagtacaatatttaggactattctacccaacaagatcagaattcacatttttttaggttcatacattcaacattcaacagcatacaccacagaagaggctataaaatgtttcagtaaatttacagggattgaagtcatgcaaagtatgtcctctaacaacagtggaattgcattggaagtcaataacagacagatatctggaaagcccttcaaatatttggaaattaaccaacagacttttgaataatccatggaccaaaaaaagaaagcaaaagagaaattaaaaaatattttgagctgaataaaaaagagcacacaacatatcaaaataggtgagatgaagctaaagcagtatacagaggaaaatgcatagctttaagtgcttatttagaaaagaagaaaagttagaaatcaatgacctaagcgtacaccctaaaaaactcaataaaaagagcaaagtaacaaaaggacgtgacaaagatccgagaagaaatcaataaaatagaagacaggaaaataatagagaaaaattaataaaatttaaaccagagttatgaaaaaatcagtaatactgataaaattcttttcctttttttttcttttttacccgaggatatcatcctctactggtacaaataagatgagggggcaaaagattttcaattacatgatgtcgttctcaaattacaggcaacattctaactagactgattaataaaaagagaagacacaagttatcagtatcagggacatcactactgatcctataaacactaaaataaaaagagaatattatgaacagccttatggcaataaatttcacaacttagattaaatagacttttttatttatttatttatttattttgagacagagtctcgctctgtcgcccaggctggagtgcagtggcacaatctcggctcactgcaagctccacctcccaggttcacgccattctcctgcctcagcctcctgattagctgggactacaggcacctgccaccacatgcggctaattttttgtattttttttagtagagacggggtttcaccacgttagccaggatggtctcaatctcctgacattgtgatccacccgcctcggcctcgcaaagtgctgggattataggcatgagccaccacgcccggccaatggacattatttcttgaaaaatacaaattgccaaactggcttaagaaaaaatataacatttaaatagctttatacatcttaaagcaatgattacttagcatgtatcagaatcaactggagtttgcccagttccagaatttgattttgttagtctggggtagggcataaaagtttttggacgcgtacagtggctcacgcctgtaatcccagcactttgggaggccgaagtgggtggatcacctgaagtcaggaattcgagaccagcctggccaacatggtgaaaccctatctctacaaaaaaaatacaaaaattagccaggcgcggttgtgcttgtctgtaatcccagctacttgggaggctgaggcaggagaatcacttgaactcaggaggcataggttgccatgagccaagatcacgccactgcactccagcctgggcgtcagagtgagacttcgtctcaaaaaaaaaaaaaagtttttaataagttccagatgatattatgctgctggcttattggccacattttgagaattagtgtcttcttttcctattcatttaatgtttatatttttacttttgttgtttctaaggttttttttcctggctttgttgaggtataattggcaaataaaaattgtatatatttaaggtgatacatgcaacatgatgtcttgacatatgtatacattgtgaaataattgctacaatcaagctaatcatcatatctatcacttcacacatagatgccattgtgtgtgtgtggtgagaacatttaaagtctactctcttaacaagtttcaagcatataatatagcattattaacttcagtcaccgttgccatacattaggtcaccaaaacttgttcatcttatgtaactgaaacttattgcttcttgagcaacatctctcttagcccccggcaaccaccattctactctatgcttctataagtttgactttcttagatttctcatgtaagggaaatcatgcagtgtttgtatttctgtgcctgtcttatttaacctagcataatgtcctccaagttcattcatgttgtcacaaataacaagatatcctactttttaaaggctgaataatatatgccattgtgtacgcatggaacacatagaaatgttgtctacataccacatcttcattatccattcactggtcaatggacaattaggtttattctacctcttggctattgtgaatagggctgcaataaatacagaagtgaggatagtagtagaattgctgtatcacacggtggtactacttttaattttttgaagaacctccatactattgttcataacgcattttttttgttttgttttgttttgttttttatggaatctcgctctattgcctaggctggaatgcagtgtggcatgatctcagctcactgcaacttctgcctccaaagttcaagtgattctcctgtctcagcctcccaagtagctgggattacaggtacccaccaccacacccagctaatttttgcttttttcgtagagacggagtttcaccatgttggccaggctgatctcgaactcccaacctcaggtaatccactcgccctggcctcccaaagtgctgggattacaggtgtgagccaccgcacccggcctgttgttcataatgactgtaccaatgttcaatcccaccaacagtgtacaagagtttcctctctgtgtgcctgctccccaaagaaatgagcgcaactgggaaaattatttttaaaaatcaaccatttaaagtttctggaaattgttctaagagcctgtggcaaatgaagaaatatttgttcaagaaaatcaatgaaaacattgtaaaaacagtaaaagtctgtggcatttgaaccacaacttcttcctaccctcaaccctcccagcttagcatgatggaaactcgactccaggcgtgagcagccaagagcgcagggctccttctcctccagctaacagtcgatggctacagaacctttcaaggagtggcagtccacagcatttattgccccccaaaaccagctacatgttgcagaggctaaattccaggcaagtgtggtcaagaggtttggggctccattcttccacccagatccccacaatagagtggaggctctacttatggcatgaaacactgcgaatactaggccctgatcaccctcactccagctagttcacagtttcaatgtcaggggaaggaagctgggaagaccagaggctaccaatctcatcccctatcctgctcctaaagcagagggatcactcagaagtgggctactgtctctgcccccaggctgatattttgccagggtaagaggcaaaccatgagaacagagatctctgaagccctccccaaaggaactgactttattttaaacaaactatagggaagtccatgcctaagtcacaaaccatggaggttttggtggtaagcaattaaggatattggtagcttcatgtgaaccacaagctaaactataggtcaactagtttaccagagagaaccaaagaaagaggacattaaaaggagccttcctgctcacgcctgtaatcccagcactttgagaggccaaggtgagcagattgcctgagctcaggagttggagactagcctgggcaacatggtgaaaccccatctctactaaaatacaaaagaaattagccagccatggaagcatgtacctatagtcacagctactcaggaggctgaggcaggagaattgcttgaacccgggaggcagaggttgcagagagccgagatcacaccactgcactccagcctgggcaacagagcaaaaaaaaaaggggggtgcttcctgggataaaaaaaactaaccttaaacactagactcataaactacataaactacttttacaaaaggaccccagtgtaacaggatgagactatgaagcaatttctgtctcagagcattgttgaaaacatttgcgcagtcagctagcaatgattggagcttaaagacgggtgtgatcagggaaagagactaagaaagcccctctggaaccactgtcatgagagagtgactgtgtacaggcccaaggttgcacatttcaaggggcaacaactccactaaaatagtccatctgatcactaaacaaatcagcccagggggagggagtcagggtctatattatctaactattcctaaaaatgtcctgttttttaaaaaattacaatacatgaaaagaaacaggaaaatgtaactcataggcaggaaaaaaacaacataaacaacaaaaaccatctgtgagatagctcagacgtcagatttaacaaacaaagtttccaagacagccatgttaaatacattcaaagaagtaaaggaaatcatgctgattgaagtatgatgaaaatatgtcattatataaaaaatatcagtggagagataaaaattattttaaaaaaccaaatatttccatctggagctgaaaagtacaaaaactgaaataaaaaattaaatgggcttaaacagtagatttggactagcagaagaaaaaataacaaacgtgacagtagatcaatagaagtgatacaaccagcagaacagagagaaaagaagaaaaatgaatagagccttagagacctgtgggatgtgatcaagcacacaaacgtgcatactgtagaatcaggaggagacagagagagagagaaagagagaggagaaagaaattctaggaaataatggctgaaatcatcccaaatttgatgaaaagcattcatctgcatagtcaagagcttaacaaataacaagtaggatcaacacaaagagatacacacagagatgcattgtagtaaacctgctgaagatacagagaaaatcttagaaacaacaagaaaaaaacaatttgacatgaataagggaaccacagcaggatttaccactaacttctcctgagaaacaatggtagccaaggtcagtggggtaacatactcaaagtgctggaaccaagaattctttttcttttttttttttttttttttttgagacagggtttcactttgctgccaaggctggagtacagtagcatgatcatagctcactatagtcttgaactcctggactcatgggatcctcctcctgcctcagcttcccaagtagctgagactaccagcacaccatcatgcctggctaatttttttttttttctgagacagggtcttgttatgttacccaggctcatcttaaactcctgaactcaagtgatccttctgccttggcctcccaaagtgctggaattataggcatgagccaccaagcctggccaagtcaaacaagaattctatatccagcaaaactacccttcaaaacatgaaaaataaatttaagacttttccaggcaaaaactgagagaattcattgctagcagatctgccctacaagaaatagtaaagagagtccttcaggctgaattgaatggacactaaacttaaacccacctgaagaaataaagaccactggaaaataaaattacatggatatatacacagtataaatgtattctttgctgctcatttttctcctgacttaaaagacaactgcttaaacgaataatttaaaacctatgtgttttatcccttttaatactattgtaaatgcattttttctttctttttttttaaattatactttaggttctgagttacatgttcagaacatgcagttttgttacataggtatacatgtgccatggtggtttgctgcacccatcaacccatcacctacattaggtatttctcctaatgttatccctcccctagctctccactcccccgacaggccccagtgtgtgatattcccctccctgtgtccatgtgttctcattgttcaactccacttatgagtgagaacatgcggtgtttggttttctgatcttgtgttagtttgctgagaatgatggtttcctgattcatccatgtccatgcaaaggacatgaactcatcctttttttgtggctgcatagtattccatggtgcatatgtgccatattttcttaatctagtctatcattgatggacattcgggttggttccaagtctttactattgtgaatagtgccacaataaacatacgtgtacatgtgtctttatcatagaatgatttataatcctttgggtatatgcccagtaatgggattgctggatcaaatggtatttctagttctagatccttgaggaatcaccacactgtcttccacaatggttgaactaatttacactcccaccaacagtgtaaaagcattcctatttttccacaacctctccagcatctgttgtttcctgactttttaagaattttttcttgattttattttcagagtgttcattgttaatatatagacttgcaaatgattttttatattgaacttgtctcctgcgaccttaaagaactcttgtattcattctgatagctttttagtggattccttagtgttttatacatagaagattatgtcatttgtaaatagagatagttttacttcttcctttccaatgtggatgtcttgtaattctttttcttctctaatttctctggccagaacctccggtatggtgttaaatagaagtggcaaaagcagggaggccgaggtgggtggatcacgagggcaggagatcgagaccatcctggctaacacggtgaaaccctgtctctactaaaaatacaaaaaactagccgggcatggtggcgggcacctgtagtcccagctacttgggaggctgaggccggagaatggcgtgaacccaggaggcagagcttgcagttagctgagattgcgccactgcactacaacctgggtgagagagcgagactccatctaaaaaaaaaaaaagaagagtggcaaaagcagacatctttctctttttcctgatcttgggagggtaaacattcagtctttcactattaagtaggatgttagctgtgggtttttcataaatgtctggtttcaggttgaggaagttttcttctgttcctagtttaatggacattttttatcatgaatgataacttcctgagaccaaactgaagaatacgtaaatgaaggatattggtaactagatcagattggtgaattatatctgttgttgaactgataaggtagccagaatgctttctgtcatagaggcaagttgagccatccctggatgcattggtatgttaatatcaaggagagaaccatagtacatatgttcgtctccactgaaatttgtttgtccccatctccttaaaccacacccctgccccattgaatctaggaagtcatagaatttacaaataaatgagaagttcctaataaagaactattgtcagacactcttttatccttggactcaagtgggtgatcataaacttcagaaatacttaattgtatgtcattaattgcaaattaaaacatcaattgcagaaattgcaaattaaaacaacaaagagatatcactacatacctattaggcaaaaattcaaaacaccaataacattacgtctgccaaggatgtggaataacagaaactctcattcatggctggtggcaatgcaaaatggtacagccgctttggaagacaatttggcagtttcttataaactatactcttaccacatcacccagcaatcaagtgtcttgggatttacacaaactagttgaaaacttatgtccacactaagacctgtacgcagatgtttgcagctgctttattcataagtgttaaaccttggaagcaaccaagatgtcctttagtaggtcaatgggcaaataaacagtggtacatccagacaatgaaatactattcagccctagaaagaaatgtgctattgggccatgaaaaggcatgaaagaatcttaaatgcatatcactaagtggaagaaaccaatctgaaagggctacgtactgtatgttttcaactctataacattctggaaaaggcggaactatggagatagtaaaaagattaggagttgccacaggttaatggggagggagggagggatgaataggcagagaacagaggatttttagggcagtgaaactcctctacagcatactgtaatgatggatccacgttaggatacacttgtctaaacctgtagaacatataacgctgagagtgaaccctaatgcaaactataaattctggttgattatgatgtgtaggttaatcaactgtattaattttaccactccagtgggggatgtgaataataggggaggccaggcaagtgtgaaggtagcacagggtatgtgggaaatctcagtggcttcctcttttttctttcttttcttttttttttttttttgagacggagttttgctcttgttgcccaggctggagtgcaatggcacgatctcggcctactgcaacctccgcctcccaggttcaagcaattctcctgcctcagcttccagagtcgttgggattacaggattctgctaccatgcccggctaatttttgcatttgtagtagagactgggtttcgccatgttggccatgctggtttcaaactcctgacctcaggcggcctcggcctcccaaagtgctgggattacaggcatgagccaccgctccgggcctctgtgccttcttcttaattttgctgtgtgtgaacctaaaactgctgtaaaaaatgaagtctactttttttcaagttaattgaatgaaaaatcagtcagtaacagaatgacctcaaaaccaacaaagaaattgcaatgcagagtatttgagtctgacatctaacagaaacactataaaaaggaaagaattactactatccatgagaatgtttgggctttttcaaaatgacaatattttaaaggacgtagttcaacataaatcattagcttattaatatttctatgccattttaggttaatacgcaaactcagtgtgtaatattttaagaattctaacgcaaaatattgagccatctgtaaatctaagctgctttctatgtgactaccaaaaatctactctggtactttttgctgtaagatatttgtaattaattttcccttcacatgtataatctactccattaaacctaagctgtgagacccattattttctaatatccttccaagagatctggaggaaggtactagagtggcgaagggttctgccctggcacccactcgccagcagcgtgaccttgggcactttttccgtctcagtttcctgacctgtaaatagattaaatcaacagtcttatcccataggatttttgaaaaatgatgaaattaattaataattcaaagctcttagaacagtgttgggtacagagtaagcgcctattaatatttattgatattattaatacaattttgacacttaaaagtgagtttggcttgtgtaattattctttttaccctctggtataaaatgtttacccctgatgtggctgacccctatgtgaatagatacctcagcttctctttgtctactctctgcctattttgaaacacattgtgccatcagcaataaaggaaataacttcacagagcattagcagctacttgaacattccaggcgtggtcccagctgaaagcactggcacatgtggtcccccagcccaggattcccttccctcccctttctttttcttttcttttgttttttgttttggtttggttttttgagacggagtcttgctctgtcacccaggctggagtgcagtggtgcaatcttggttcactgcaacctccgcctcctgggttcaagcgattctcctgcctcagcctcccgaggagctgagattacaggcacccaccaccatgcctggctaatttttgcatttttagtagagacagggttttgccatgttggccaggattttctcgaactcctgacctcacgtgatccacccacctcggcctcccaaaatgctgggattactggagtgagccaccgcgcccagcctctttcctctcctttccacacgactccttccctccctccactcaactctctgctcaaatattgtcttctaggagtgacctgtcctagtcccccaattctcttttatactatcaatcagcacctatgattatatttttgcttgttctagtttcttcactagaatgtaagtttccaaagggcaaggactgtatctcattcactctctctcttctgcttccagaacccactgtgattagactagacttccttggcctccctatggaaaagagcaccctcttcttggtctcccttattttgctttgattttctttacagtatgcattatcatattgtttaattatttgtttttcatgtccctaaaacataaacctcatgtctccagtgcctaaaagacgtggcatcaattagacacttaataaatattttattttttgtctatttttattttattaatttttttattttttatttttatgtgtacatagtaggtggatatatttatgggggtacatgagatactttgatacaggcatgcagtgtataataatcacatcagagtaagtagagtatccatcacctcaagcatttatcatttctttgtattaataaatattttaatgaataaagagtacctggtataaataggccctcagcaaatatcccaagtgaatacattttccagaagatgtaatggaaggactaaaggaaggctatatttcccatggtcaatcaaaacataataaaatttttatttaaaaaattccattatatcttacataagacaaattagttctattataaagccatgattgctaagctcagataggccctcaacagctcagaaattctattgtgttgtcaacttattttctcattttccatgacaattattccaaatcttctctcctcttcatccagcccctccttttcctacactcccagtagataaatccatatatcagtaatctatttctgtataacaaagtactccaaaacttagtggtttaaaacattaaaagcatttattatctcacagtttctgttgctcaggaatccaggcataaattagctggatgcctttggctcaagatctctcatcaggtttcagtgaagctgtcagtgaggtctgtgatctcatctgaaggctcaacgggggtaggatcctcttccaagcttactcacatggttgttggtagtgttcagttccttgtaagtggtcagttagaggcttcccttagtttcttgccttgtgagcctttatttaggattgcacatgacatgaaagctggctttcctccaggtgcacatgcacacaagaaagtccaagccagaggccactgtccttagattctctaatagcagaagtggcatctcatcactccaccatgttgtatttgttagaagccagtcactaaggccagaccactcttaaaggagaggattccacagggaatgaacaccaggagacagggcgtcttgtgagatcttagagtctgcctagtgcacaccacttccaattttacagagaaaatagaggccatggcattagaactttctcatcttctacccattcatctgcaccaccctgtcatccttttctgctgtagcagtggagatgcgatacttccacctgtgctttggttcccatttcgatcctttttctcagattattgagagccagtctgagaggggtaaattgattattacccctttgttgcacagtcaacctctcaactcaactgcatcattcccaacagcctttcagtggactcaagactcttcccacagaagcaaaccagcaaaaacacaaacaaaacaaaaccaaacctccacttcccttctctttgcaatatgtatcattttatttatctcctttatttatttttccaaataccctccctcctcaaaagaaaaaaaaagctgtctgttgtcacttgtcagtacactccaagatagcttttggcagaattacttgactaactgttgctggtgttgccggtgacttcatgaaactcaatgaacattttttagtccctgtgttctcttaattttgaatgctggtgactgctccatcctttctgaaaccccctcttcccttactttctaagacaatgctctcctgtttcaattcctgtttctgtagctgccccttctctagtgcttgtgtgggattaccttctcctattcatccctttgacgttggagctcctcggggcttggtcctaagatttcccttctcactctgattttctcttttttggtgaccttacccaagtccttgtttcaactaccatctcaatgcatatgactcaccaactgacttctgtagcccagaattgtgtacatattgacccatttgacatttcttcttgatgtctccaaggtacttcaaactcaatatgttcaaaactgaactcattattttcaccccaaacctgttttttttttcttgtgttctctagtgtatttgtttcctagggcttactgtaacaaataaccacaaactcagtggcttaaaacaacagaaatatattctctcacagttctagagacaggaagtctgaaaccaagtttcaagagttggcctccttccaaaggccagactgaagggaggatccttcctttgttcttccaacttctggtggctccactggttcttgtctggcagccacataacttcaatctgtttctccatcttcatgtggctttctcttctcctcttgtgtttcaaatctccctctgcgtttctcttagaaggactcagaataacccaggatgatctcacctcaaaatccttaattacatctgcaaagacccctttttaaaaataaggccacactcacaggttctgggtggacatgtctcttgggaggccaccgttcaacccagctccatgaatggcacctttatcccgttgttcaggccacaggaacctcataactgtgtttgtgctatcttttcacttgtttccagtatccaaagcatccgcaagttattttaattcctcagcatctcaggtatctgtccacttctccctctttaccactaccttgctcaagctatcatcacctatcacctagagtctgtaacagcctcctgtctatccacagccactcctgcatcctactgtgcattctgcgcactgtagacttgtttcaaaatgcaaatctgatcatgctgccccactctgccttatctccacgtgttcattgttcttaggaaacagacaagtgtaacacagtctatattaaaatcaaaatgaaatgaggataagctgcaaactgtgaagcttttgggatggtaatacataccaggcagggacatacttggtaaaataagaagaatacctacaagaatggatgactttgaacttgacctgcaacaatttaatataatgaccttcctaggtcccttctctactctatagaaaacaaagccactgggaattgatgctaaaaagcatctgtctcccttcaacactcatcatgcagtgaattttgagacggctgggatcccctcagagtatttctgccagcagcatttaaacttgtcaagccttctttctccatcctcatcttttcttataactcttctgctgtggtacctgaatgtgagctgtccaattggtttcaaaatgaacggactccaagttacctacttttatattactgtcactacaaagcagtcctctccaatttatgttctaaaaatagctaagtggagaccttataggtctgatgaaagcaaatctgtagcataaaaaaataaggtgttcaccagtcaatcataaaccaccctctgggcacctataatgtattcagcactgcgccagttgcactcccctttagcaagtgttttggccacaaaacagggagatggagtgcaaagtgattttcacgagtaaaatattccctccataatttctgttcttaggataggcttgattctgttgccataatgaacagccctaaaaccttggcagcttaaaacaataaagggttatttccactcttgctacttatccagcaggttggctgggactttccatcatgctgtcttccctcctagaccagctgatgaagcagccactgttgggacatgcctggtcactatggcggagagggaaatggctcttgaagggcttgcaccagtaattaaatgccctggccaggaagtgagatgtgtctctttgtctgtcagctcactggctagaatatggccccacttaaccataagaggcccagaaaatgcattctatgatcttctcagacagagagagcactggaaatatttgcaaacagcactaaagatgaccacagtctgccctctggtcactaaatatttggactacccttctttccagcaagcaaaatatactcaccaccctccccaagagaaataatccaaaagttccacccaatgagggcatcagacttgaagtcccaaagtgctgggtggggcatgagcatctctactgcaggtccaagaaggcactctccatccagagagagtatctgtccattctaaaattacatctgcaaagaccccttttttaaaataatactcacagattctgggtggacatatctcttgggaggccaccgttcaacccagctccatgaatggcacctttatcccgttgttcaggccacaggaatctcataactgtgttcgtgctatcttttcacttgtttccagtatccaaagcatccacaagttattttaattcctcagcatctcaggtacctgtccacttctccctctttaccactaccttactcaagctatcatcacctttcatctagagtctgtaacagcctcctgtctatccacagccactcctgcatcctactgtgcattctgcacactgtagacttgtttgaaaatacaaaactaagctaaaagccaagttatctgtcccacctcccaagctattgccccactcccaatatacaaaaatagaacagttgtcggctcaccgccatcagcacaccttcagagaggagaaggatggaaggcactcagacactgactctattttcccttctctgtcgtatttattgcagtgaacttttacatagtgtcacgtatctgtcaagaatgcccgtaagcacggtacatatattaattgatttaaccctcactctacagcactatgggaaaggtactgttgtaaaccccatattcagatgagaaaactccaacaacttatttgtgcaaggcccccagctagtccacgctacagctgggcttctgcctgaagtagccgagctccagagtctgctgctaaccattataccacactacctctgcagaatggcttcgtctttagagattcatttacaagtaaaattccaaattaaacttgcaacttaaaagtggaaaaaatgcttctcatgagaagtacatctgaatcttgaagggaacagactggttcctggagttgccagcacccacctctcaatgtgcacttgcaaactccccagtgggttgctgtgtgcacccaggaggagcctgtgggacaggcacacctctcagagttggggtcccactcaaatgtgggatgctcccaggtggctgtgtcagaaaagctccaggtagaaaggactgcagctttgctctactgccagccaaggaaaccacctgtgaacaagtacacactcatgggagtggaaagggaaatggactttctgaatccaacacaggctgtgttttgaagaccgcttcatgagtcatttatgattttatggttgtaatttcccaccacttagacctaataattttgtctatttagacccaaggatcaccacaaaccccattccttatattcataagttctttgtttttattcttctttagatatgtattccattaactaaagcgtgcatttttaagacacacccatgagttcctgactctaaggtttttccctacaacaatctgcaaataatcatttcactatctttaacatctttagtttagttttaattatttatttttatttatttatttattttgagacagggtctcgttctgtcacccagactggagtgcagtggctgaatcatagctcactgcatccttcacctaccaggcccaagcgatcctcccacctcagcctcgtaagtagctgggactacaggtgcatgccactacacctggctaattttttttttttttctggagacgggcatctcactatgttgtccaggctagtctcaaactcctgggctcaagtaatctacgcacctcagcctcccaaagtgctaggataacaggcatgagccaccatgcccagccatcacctttagttttcaagcaaagaaacagacaacctgaaatttcccatagtaagtggatcttatcctgccctgatgcttacagaatttgtcttggtcctgattgctttattctgatttgatttgttttgttatagtaagagaatccttttagtgtataatttccagtcgtccttctattttatctataaatttggttttgttacgcttgttttgtttttctcaggaaaacccactgcgtgtggtatcattactgtcggtttccatctccagcaccggatcacggctgcccccccaacctctgcccctagtacttgatgcgtttcccccagacctcatctccatggcagcagtacagatttgattccaacgggcttctcaggcgggttttttttgttttgttttcttttttcgagactgtcacccaggctggagtgcagtggcgaaatctcagctcactgcaagctccgcctcccgggttcatgccattctcctgcctcagcctccctagtagctgggactacaggcgcctgccaccacgtccggctaattttttgtatttttagtagagacgaggtttcaccgtgttagccaggatggtctcgatctcctgacctcgtgatccgcccaccttggcctcccaaagtgctgggattacaggtgtgagccactgcgcccagcctaggcggttttcattttacaaagatttttccctcaacgaattctccaatatctacttttcccctctttctgttgtttaatgctcttgtctttgaccacttgggtctcttgtttgaactcttgtttcgtaaagatgtcctctttaatttctttgagggattatagaattcataactaaaggtttcttcaattatatgagtcaattcttgttcaggcatatattcttttttttttttttttagttattgataaaaaatggtttgtttgtttgtttgtttgtttgttttttgagatggagtctcactctgtcgcccaggctggagtgcaatggcaagatctccgcctcccagattcaagtgattctgcctcagcctctcaagtagctgggattacaggcacccgccaccacacccacctaatttttgtatttttagtagagacagggtttcaccatgttggccaggctggtcttgaactcctggcctcgagtgatccacatacctcagcctcccaaagtgctgggattacagatgtgagccaccatgcccggccttataaaaatgtttttgatcgcctgtaatcccagcattttgggaggctgaggtaggcggatcacttgaattgtgcctttggtgttgatattagattaatgctggccccaaagaacgaatgatgaagtgtttcctccacttctattttctggaagagattgcgaggaactggtattactttttccttaaatgtttgatagaagtcatcagtgagattttagaccatctatgtgtggtgctttctttccttttttacttgaaggttattgttgattcaatttcatttatgtatatagggctaattaggttatctctttcaccttgtgtgagttttggtagactgtgtctttcctggacatccacatgcacaaaaatgtccctagaaacagatcttatacctttcacaaaacgttttttaatttaattgtttttgagatggagtctcactctgttgcccaggctagagtgcatcaccctgatcacggctcactgcagtctctgctgccagggctgaagcaatccttccaccttaggctcccaagtatctgggaccacagcaatgtgtcacatacctggctaatttgtaaattatttgtagagggtgtcactatgttgccctggctggtctcaaactcctgggttcaagtgattctccagcctcagcttcccaaagtgctgggattacaggcgtgagccacctctcccggcccacaaaaattaaatggatcatagccctaaatgtaaaactataaaacttctagaagaagacatggaagaaaatatctttgacctagaatctggtgataagttttttgttacaacaccaaattcatgtcattgatacatatgtgcacacggctgttgtccagagaggcaagaaacaagagattgaggctgggcatagtggctcatgcctgtaatctcagcactttgggcggcaggggcaggtggatcagctgaggtcaggagtttgagaccagcttggccaacatgacgaaaccccatctctacaaaaaaatacaaaaattagccaggcatggtggcgggtgcctgtaatcccagttactggggaggctgaggcaggaaaatcgcttgaacctgggatgtggaggttgcggtgaactgagattgcacctttgcactccagcctgggtgacaagagtgagactccatctcaaaaaaaaaaaaaaaaaagattgaagcacccctcggagccccttctgtcagctataattccttactctgtctgcctgcacattcattgaagacaaatctgaaaactaaacagaaataaacccttaagctccagaccgtttacataccgaaagcatgttattcaaagcactaggctatcaaatggatgtcacatccaatttgtttaaacagacacaatatgtgaataatggtggacaaatatatcgttggacaagtttagagtcatagatttcttttatcctaaagtcacaaaagctcaagtttaactctaaacaaacaaaactgtgaattgaaaaaaaaaactttggccttactcaagagatttttctgttgaatttcctccaatagtcagtaatggatagattaaatcttcagaaaaataaaaaaagtttgtgtgtttaaagcaagatgatttctttctttgtcaatattttttatttcaataagcttttggagtacaagtagtttttggttacatggatgaattgcatagtggtgaattgtgagattttagtccattcatcacacaagtagtgtacattgtacccaatatgtagtttttagtctcccacctccctcctatcctccccattcttagcctccaaagtctattttacccctctgtatgctgtttcatatccacagcttagctcttcctttttttgtttttttgagatggagtcttgctctgccgcccagactggagtgcagtggtgcattcccggcttactgaaacctccgcctcccaggttcaagcaattctctttcctcagcctcctgagtagctgggattacaggtgtgtgccaccacgcccaaataatttttgtattttttaagcagagatggggcttcaccatgttggccaggctggtctcgaactcctgacttcaagtgatccgcctgcctaccttggccccccaaagtgctgggattacaggcgtgagccaccgtgccgtgccttagctcacacttataagtgagaacatatgatattcagttttctgttcctgagttactacacgtaggacaatggcctccagctccatctaagttgctataaaagacgttattttattcctttttatggctgaatagtattccataatgtatgtatgccacattttctttatccactcattggctgatgggcacttaggttggttccatatctttgcaatggtgaattgggtaaaacaagatgatttttgttaatagagttgaatgttctcatggggagcagttagaaaacgggtcaagtggctgagtgcagtggctcatgcctgtaatcccagagatttgggcaggaggattgcttgagcccaggagttcaagaccagccaaggcaatatagtgagaccccagtttctgcaaaaaaatttaaaaattagcaaggcatggtggtgcatgactgtggtcccagctacttgggaggctgaggtaggaggatcgcttgatcccaggaggttgaggctgcaataagctatgatcatgccactgtactccagcctgggcaacagagcaagaccctgtctcaaaaagaagaataagaataagaataagaaggggaggaggaggactacagagcaaagtctttaaggttttaatggaaaattcttcacctggaatactattcccagtctgattatctttcaaaattaagggcgggatgacagatgcagtatatttcaaggagtcagcaaatatactgcattagtgaagaaagacgccaatgcgtgtatcagtacattggtctcaataaacagattatatccctaatggccttagctgggacacgggaggaaggaattgctgctaagggttttaccttgcaggagggagcaaagtggaaactgatgaactctaagtctcagtagaatttcaccattctattggatcattggtccaacacaactgaatcatcaatcccaaggaaacccagatcaccatttacttgggtcactctcctcccagcagtgagaggttgtctgcaccatctggaaaggtaagatgtagatgtgatgtagtctgctgatgagacttcaacagttgtgctttccagaccactgaaaacccaaagtattatggcggaaccagtatagcagtttcctcttatccacagtttcactctctggggtttcagttacccacagtcaactgcagtttgaaaatattacatggaaaattccagaaataagttttaaaatgtgcactcttctgagtggcatgataaaatctcacattgccatgcttcatcttgcctggacacaaaacagccattagttcagtgtaatcacacagcctacgctacctgccagttagtcacctaggagctgtctgggttctcaaaccaactatctcagtattgccgtgtttgtgttcaggtagcccttattttagtaaataatggccctaaagtacaagaggggtgatgctggcatattgttataattgttctattttattatgagttattgttattaacatattactgcaactaatttataagttaaacattatcataggcatgtatgtataggaaagcatactatctgtagggtttgataatatccacaattccaagcatccattgggggtcttggaatatctcccttgcagataagaggaaactactgtacctggcacaaaaaccttcttttgaaaattaaactaaaggcatgctgtattactctgttctcatgctgccaataaagacttaccagagactgggtaatttataaaggaaagaggtttaattgactcacagctctgcagggctggggaggcctcagaaaacttacaatcatggcagaaggggaagcaaacatgtccttcttcacatggcagcagcaaggagaagtgcagaacaaagtaggggaaagctccttaaaaaaccatcagatctcatgagaattcacgatcacaagaacagcagcatgggagtaactgcccctgtgattcggttacctcccgccgggtacctcccacaacatatggggattatgggaacgatgattcaagatgagatttgtgtagggacacagccaaaccatatcacatgcacaaccttttacttaggtgagttctgttgtatccaaagctattcaaggtgattattactagtaccatgccttctgtgttttctggaccgaattcacactagaatcctcttactcagcatagagccaatttcagcattgtcctgcctcagccacttccaatactgcatatagaaatacccatgcaccctgaagagcctttcacaaggctctctcctgatacttaatgacacagggccattttctcttcattaaatcatgattttaaaacatacaacaaaatgtttaaaaccaaaacagggcgggcgcagtggctcatgcctgtaatcccagcactttcagagactgagccaggtggatcacttgaggtcaggaatttgagaccagcctggccaacatagtgaaaccccatatctactaaaaatataaaaaattagccaggtgtggtggcgagcaccaggctgaggcaggagaatcccttgaactgggaggcgaaggttgcaatgagctgagatcacgccactgcactccagcctgggcgacagagccagactttacctcaaaaaaaaaaaaaaaaagcaaaacatatgacaataaaacctgataatttgctaaacatagaattactagatctgatatatcataaaacattaccacaaccataagcagaacagagcaaagtaccatgatggttacttttatgtgtcaactttgaattcctggtttataaaatgatttatagctttgcattcaccaaataggtaaaactacacttttaagatgacaaactgggccaggtctggtggctcacacctgtaatgccaataattagatgggaggatcacttaaggccaggagtttgagaccagcctgggcaacatagtgagaccctgtttctacaaaaaataaaaaattagctgggtgtggtggcatgcacccgtagtcccagctactcaggaagctgagatgggggattgcttgagcctaggaggccaaggatgcagtgagttatgattatgccactgccctccagcctgggccacagagtgataccctgtctcaaataaaatttaacaattttaaaaactagctgggtgtgatggcacatgcctgtagtctcagctacttgggaggctgaggtgggagaatctcctgaactcaggagtttgaagttaaagtgagtcatgattgcaccacttcactccagcctgggccacagagcaagacctcatttcaaaaaaaaaaaaaagacaaactgacttggtaagactacttaaaattaagaagaccttcctttttggccaacgttccaacatggtacataaaaaaaaagacctcggttgtaagttttgtgggggtttttttggtataaaattatcctaaatttctagtctttatttaagatgaacataaattggctctatagagttttcactgaataattaactaaggattcagcttctcatttgtagtaagattgaaaaagataaataaatcaggcctgtgaccaatttaccccaaaatacaatttcttcattataaagaacaaaacaggaaagaagttaaagaactcccttaataaaagcactgaactgccacaagtctaatagactattagagcctagatgaagatggaaaattacctaataaaaatcgcaatttgcatagatttgccccataattacaaaacttattaagttccattttcccagatactataatggggttcacctttcatttaatgcaattcgtgatcactgactacttcaggcagcaaacgttggtaaaatcaaatccataattacatttttggttcatatgtgaaagactgaaatattcactaactgatctatatactatttgttaaaattaagtagaatgaaaaattctgaagagggttttactcaaatctttaactaccgttttcaagcctttcgctccattggctctgtccaaagcgaggttatgaaggttacaaaaccgaaagaaaacacttgctttgggtctatattcattccatctagttcaatacagtacatgtttattaaaatcgtcccatatgtgtggtcctgtctgaattaagcaggtgggataactgccaaatgtctgttttatcctgaatcctgtaagtagcaagtgccttttggttctgtggcagactgagaccagtaaggccgccagtgaatcatgcctccctgggtccactgtcttttcagtgtaattttgtgacccctcccatcaagatgatgggtctatttccccatcacctgaatctaggctgggcttgtgacttgctttggccaatgaaatgccacagatgttcagctgggctatgagaaggcctatagcttcctctttcccctcttgcaatattcctgctgtcaaggaagcaagactgggctagacccagtttcaggagaggcccagcagatagcagacacgtgaggaggccatcatggattcttgagctgccagatgaccacagtaacatgagtaaccccagaccagagcaacagaaaacccgcccagctgagcccagccaacccatggaaataatattacataaataaattaatgaaaacatatttgttgtttttaagcaccccaagtttggggatggcttaagcagccctgggtaactgacaccactgacaccatctccaaatccccagtttcccagaagagagtctctactgttctggaaaccacaatagtgggtgtgactgtggggaatggtccctgaaagcacaaatgtgtcttcttttcattttttcactagtagttattgctactagttcaaatgcactattcctgttatcttcatcagtcacaataacatttagggttatagaagatttctaggtagaaataacctacatatggagatacatgcagaacgaatttcagtgtgttccttactccagtgaagtcttgcaaagtggtcttaaagggcctccacatctgcacacttccaccttggctgtaattgtgtagcagactcccaaatacacaagttgattgatagtttgattggttaacttgttctgaagtcatatccattgatatttgtttgaatgtcattcttggagcgcagagaggaaaggtcctgtggaaggttgcgcactgtggggctggctccccagtccaaccaatgaggactcccacttccatgccccaataccttttttttttttagagacagggtcttgctctgtcacccaggctggaccacagtggtgtgatcctagttcactgcaatctcaacctccgaggctcaaatgatcctcctgcctcagcctcccaagtagctaggactacaggcatgtgccaccatgcccagttaattttttaatttcttttttgtagagatggggtctctccatgttgcccaggctggtctcaaactcctgagctcaagcgatcctcccacctcagcctcccaaagcagttgggattacaggtgtgagccaccgcacctggccagtctccctcctcttaactgcttcctgccttcccttcccaccagacttggtttaatctctctaggccctgagttccaaaacccatctcagattgggttaaagggggaattcactctaactgtcagaaaagttatcaaaaacttgagaactgaccaaagagatttgccgggggttctttcagggcaatcctggttttgcctctttgattgactttccgttgcctgagttgttttacatctctgcaggggcagaggtgaatttcgagatttttttggtaggtatgcaaataactactgaacagtagaaaagataaccccagctacaggtttgtggactgcaggagattagccagtttgtgtgaccctgccctaatatccctttactaagttgtctaaaatacccagtccctcaaatgcactaaaccacttttagcatcttcctgaactccacattaattaatgagtccaagacaatctttggcacttcctttttttattgctgagtcatcttatttaatcttttgtgaattataccttaacataaggcccaaaaagggtttcagagaagccaaagactggaaggactcagcctcctaaagcagccaccacctcccgctgctccgggccacgaagtctctctctctctctcttttctgtctctctgtctctctgtatgtctctctgtgtctctctgtttctctgtccctccatctctgtctctcttcgcctttgtctttgtctctatctctctgtttctttctctctgtctctctctgtttcggtctctgtctgtctctgtctctgtatctctgtgtctttgtctctctgtctccctctttgtttctctctgtctctgtctctttctgtctctgtctctctttgtgtctctctgtctgtctctctctgtccctgtctctgtttctctctctctccattgatcccatgcctgcctctgccgcactctcccctggacagcctggccctctccccaacaccctaaggggaaatggccacccacagctctccagtttgcatattctcgatttagaggaatggcccagatggaccagagtccttaaatccctttccaaggaagagactgaggtcactccaacatgcttccagcctctgcttcttgaccactggaagataaggacaaggatgtgaagtttctgcatttgtatcaccaaaaacatcactggagttcctagggactgtggtggccaccccgagatttccctgcccttggtgcctggtggagagctgagccctggagaggatggaggctgggaagggggctgtggtgttgtgatggggtcagtctccctcttacctccggagccacacaccctttgccattcaccactgttttctcttttttgttcttgattaacattgccaaaatttaagtcattttacattttttcaaaagagccattccttatattaaaaattctactctaggccgggcacagtggctcacacctgtaatcccagcactttgggaggccaaggcaggtggatcacctgaagtcagtagtttgagaccagcctggccagcatggtgaaacccctactaaaaatacaaaaattagctgggcgtggtagcgcacgcctgcaatcccagctacttaggaggctgaggcatgagaattgcttgaagctgggagatggaggttgcagtgagcgaagattgtgccaccacactccagcctgggcaatggagtgagactcttgtctcaaaaaaataaaaataaaaataaattctactctagttcttttatctaatttattgtttcctgattttgtctccatttttctttttcttagctttattgtattggttttctagcttttaagggatgctaagttcatttctttttaccctctcttgcctaataatggaaacacttcattcccatcctcagagcaaaggttcagctgtgtctctcataagttttggagcttcctgttttccaagttgctaacttctaaggatgctggaactgttattatatttgtgtttctttctggacagaaggggcacctaaaaggcttgtttaacttccagggtttgagtgtttaaaatcgaccttttgtagctgatttctagttttgttacattgtcgtcagaaaatgtgccttgtggcccatcctgctgcatggaactaaattttcttgttgtgcctatttcatgggttcttggataagatgatcatacacaggccagaacgttccatggctctacgtcaatcttattacaatgcctctaactcttttgtttttcctatttgaccaaagatggagaatggtgtgttaaaccatctcattatgattttccttaggataatttattcttgaatttcttctagtttgctttatacatttcaacctcagtaatttgctacatctatgttattgatatcaacatcttcattgtcaattatagtttctgtaccgttaatattctgacctgaggccaggtgtggtgactcactcctgtaattctagttcttggagagtgccaggtccaacccgcagaccctgctgaacgaaggatgaacaaatgcactcagacacagatatccagtgaaagagcaggctaggggaccgggccacccacagacaccgaggagggtgctataaagagtcagcagctgtggccctcacaagctggccctgtgagcatttattcagcacagatttaatgacaaaggctttgagtcaacacacttgttggtaattaacatggttgccttccccagagagagcagtcctgcacatggatgattaaaggccaggttccaaggcctaagtaaactaacttatccagatcaatttctttacatccccttgctatctaacctaagttcttaagagaattcagctgccttcagccaaattttctttcgaagctttgcaaacccctggccttccaagaaggtttgcatcttctacaattttgccaccaccccaatctcctacaggggaggtcaaggcaggaggattgcttgagcccaggagtttgacatcaacctaggctacatggtgaaaccccatctctacaaaaagtacaaaagttagctgggcatggtggcacacacttgtagtcccaactactcaggaggctgaagtgggaggatcacttgaggtcgaggctacagtgagctgtgattgcaccatcacaccactgcactccagcctgggtgacagagaccctgtgtcaaaaaaaaaaactttgacctaaatctatatcgcatattaataacataagcccagtttaaaaaactgcatctatctaatattcattcattcattcattcaaatatttgagcacttgccacatgccaggcactatgcctggtgctggggacagagtgttgaatggaaccacaatgttcctgtcttcacagagctcctagtgaaggacagagaccatgatcaaatttagcaacaatgtagcaacaatgtaagactcgcagtctcacacacacacacacacacacacacacacaagcatccatgtaccattatatgctgtcatgcacactttcacacatgcacacagccatacactgccacacacatacttgcacacagccatacactgccacacacatacttgcacacattcatctttagccagtaaaaatatgcctggaggatggattatgaggaagggaattgtggggctgaaagtcatgggcatttaaaattgaccagaactgccacattgacactctccaaagacagtacaattattgtaagtaccaacagagcaggaacagagcaggaatgcttctctcccacacctttataaacacagaacttttgtgtgtgtgtgtgtgtgtgtgtgtgtgtgatagagtctcactctgtcacccaggctggagtgcagtggtgtgatctctgctgactgaaacctggatcacttgaggccaggagtttgagaccagcctgaccaacatggtgaaactctgtctctactaaaaatacaaaaactggtggggcacggtggctcacgcctgtaatcccagcacaggagggaggccagggcaggcagatcacctgaggtcaggagttccagaccagatggccaacatggggaaaccccatctctactaaaaatacaaaaattagccagatgtgggtggcatgcacctgtagtcccagctactcaggaggctgagggaggagaatcagtggaacccaggagtcagaggttgcagtgagccgagattgtgccactatactccagcctgggcgacagagtgagactccatctgaaaatataaataaaaaaataaaaatacaaaaattagccgggcgtggtggcgcacgcctctagtcccaactacttgggaggctgaggcatgagaatcgcttgaacccgggaggcagtggttgcagtgagccaagatcatgccactgcactccagcctgggcaacagagtgagactcagtctcaaagaaaaaaatatatatctgattgttaaaaacagcccagcatctcctcctgtcgctcttgctccctttctgtccagttgacacacctgctcccccatcacctctgcagtgagtggaagcttcctgaggccttaccagaagcagatgccagtgccatgcttcctatacagcttgcaaaactgcgaaccaaataaaccccttttctttataaattacccagcctcaagtatttctttgcagcagtgcaagacagacttaagacactggtccagtaggtgacggtaacatttttgttggtttattttatatttttttaactcataaacctaagcacctttcaacctagatttgtcttatctatttttagaagccctttacacatgctgagtattaacaccttgtcatatgtcacaaatatgtttagctatattgatggcgtggtgtgtatataagttataaaatttgaggtgccctctttttttcttccgttacctctagatttctttccacctctcagatgatgaaaatatgccccccgttttccgctgctactttagcaattcttttacttttgggtttttagcccagccagacttttgttaataataggaaggcagagacaagatttctcgccaaatggacaggcaattgtcctggcaacatttattgactaatcaatgaggcagttcgccaaaagtaaaatactattaccagagcaagggtagagaagagggatgttggatagtggaaaaaatgaacgtccattcttctgcataaaattttccttccaaatctcaaatctcagagcctatgttctttcttttcttttcttttcttttctttttctttttctttttttgaggcagagtctcgctctgtcacccaggctggagtacagtggctcgatcttggctcactgcaacctctgcctcccaggttcaagtgcttctcctgcctcagcctcccgagtagctgaggttacaggtgcccaccaccacacctggctaattttgtatttttagaagagacagggttttgccatgttggccaggctggtctcaaactcctgaccttaggtgatctgtctgcctcagcttcccaaagtgctgggattacaggcgtgagccaccatgcctggcctcggagcctataatctgagagaaaactgtaactatgtggtaatgagccgcatccagccaataaagagcttgctttatttagagaagacagactttgtttcatggaggaggccaggcttccgaactgagtccgggatgcaaggaggtggccacccagtcatgagcagaggcgctggttctcaggaaaaaaaataccccgggagtgaagggggccaatacagcatgtgtgctgtgaggaactctccatggtgaccaatttaatacaaagccaaatcctatgttttgatgtcttgaatagcttgccttgaagagaaaggttgccatggtaactctttcaaagacaatgtcttcaccatagaccagttgtttaacctgcagagaacaatctttttctctgtgatgacaattaaaatccaacaaggaggttgaactcagcagcaccagtatggtctccacagggagaccttcactaaaaatggcaaaacaggccaggcgtggtggttcacacctgcaatcccagcacactgggaggctgaggtaggaggattgcttaagcccaggagtttgagactgcagtgagctatgattgcatcactccactccagcctgggcaccagagcaagaccgtgtctcaaaaaatcaaaacaaaacaaaataataagacactccagtgaacagtattggcaagatcaaaaacattttttatagatgacataaatgctgtattggattctttttgaatcagcctctagacaggtcaggaaagaacaattacaagagggaaaatgtaaatgtttttaccttgaacatatgaaaaagtaaaaagtccacctaacagaaattgggaaatgtaggtagaaggagagggaaggcaagttagagggggttgatgtcttccctccccatggggacaggtttagagatgctactgaacatcaatggaacaagacacagaggttgaagtgagttatttgatgttgcaaagtcagccaccatcaccaacaccaacaaaatataaacaggaagagggaagagggtgtattagtctgttttcacagtgctataaagaaatacccgagactgggtaatttataaaggaaagaggtttaattgactcacagttaaacatgactggggaggcctcaggaaacttacaatcatggtggaagggaagggggaagcaaggtccttcttcacatggcagcaggagagagaagtgcaagcaggggaaatggcagatgcttataaaaccatcagatctcttgagaactcactcgctttcttgagagcagcatgggagaaaccacctccatgatccagtcacttcctactaggtccctcccttgacatgtggggattatggggattaagattcaagatgagattgtggggacacagaaccaaaccatatcagaagggaatggggtgagagcacgcaatcttcatttttcacattagacagtgttttgagaacccccagtgaaatcgaggttatagcaccagagtggctagcaaccctgccctagggagatgcagaggagctgggcgtgggtgtctagagtgtgcgtctctttttaaaaaatttttttattatttttattaagttgagatggtgtctcgctatgttgcctagggtggtcacgaactcctggcctcaagccatcctcccacctcagcctcccaaagtgctgggactacaggcgagtcatcatgcccagcctagactgtgcctttcatgggatacttcttttacccagtggacagtaaccagaaggtcctttgcatgggaagcttgtttacccagcggacagtgaccagaatgttctttgcatgggaagcttgtttacccagcggatactgaccagaagttcctttgcatgggaagcttgtttaccagcggatactgaccagaagttcctttgcatgggaagcttgtttaccagcggatactgaccagaagttcctttgcatgggaagcttgtttacccagcagagtgtgaccagaaggttttttgcatgggaagcctatttacccagcggacaatgaccagaaggtcctttgcatgggaagcttgtttcctgaggcctcccaaccagtggacgtcctggtggctgttgtctgagctctgtccagcttatgcctgcctgaccattgctctggcactgggagtccaacctcatgttcccagcatcccggggaaacgcagcctggggaagcccccggttcttcagctggaaggtgcaaattccatccaccaccagggtagggagcagaccctaggcaaggagggcacaatatgtgggagggcaggtcacacagaccggaatgaagagtcaggcagagagaggagagagagagatgcggctcacggtgtatacataagggaatggagcatgggtcactttaagttcttgggaaaatgtctgaatgctccacttatttatttttatttcaagagtttttgggccaggcgctgtggctcacgcctgtaatctcagcactttgggaggccaaggtgggcagatcacttgaggtcagtagttcaagaccagcctggccaacatgatacaaccctgtctctactaaaaatacaaaaattagccaggcatagtgggcacatgcctgtaatcccagctacttgggaagctgaagcaggatactcgcttgaacccggggtggggcgtggcaggggggtagaggttgtagtgagctgagatgacgccactgcactccagcctccagagcgacagagcgagactccgtctcaaaaaaaaaaagtttttggggtacaggtggtttttggttttggttacatgaataagtactttagaggtgattcctgagattttagtccacacagtgtacactgtacccaatatgtagtcctttatccctcaccccctcccaacttccccatccctgagtccccaaaatccattatatcactctcatgcctttgcatcttcatagcttagctcccacttctaagtgagaacatgtggtatttggttttccattcctgagttacttcatttaggttaaatagcctccagctcgatccaggttgctgcaaaagacatttttcattcctttttatgtctgagtggttgaatggtgtatttaaaggaagcaacgagagaaagtggggaggcagtctgctgggcaggggagagatgcctctaagttcttatctctggccactggcttgagccatttgggtgtggcagtcaacttcgaatgcccagggagcaacttttgctgtgttctttcattgcggggagtcagtctatggaacagagccacagctgtattaattacagttgtgacataaacactagaaaaactagcacatggcataaagtgactcagagaggaaaagagagagagacaggggaccatttctcttatgagcaattctctattacttaagtttcaaccatatgcatacattgataaaacaattttaatgtttcactgaagaccactgcatgacatctaaacatgtctgataatactcagtaggtgaatttaccagttttaaaaagacttgatcaacacgaaggaaaggggtaacaacagactgagagacgaaacagcatctccatcgtgggccatgtacggcccttacctggaaactgctggcaacagacaaactgaaaaaccactagagtcatctgagcacttgctgatttcacactaaggcattgtaaagagcaggagattgatgggatagtggttctctgaatttgtttttttctttttttaagagtcgtggtcttggccaggcgcagtggttcacacctgtaatcccagcactttgggaggccaatgtgggcaggttgcctgagatcaggagtttgagaccatcctggccaacatgctgaaatcctgtctctactaaaaatacaaaaattagccagatgtggtggtgcatgcctgtgatcccagctactagggaggctgaggcacaagaattgcttgagcctgggaggcggaggttgcggtgaaccaagattgtgccactgcactccagcctgggcaacacaatgagaccctgacacacacacacacacacacacacacacaaaagagtcatgatcgtgctctgtcacccaggctagagtgcggtggcatgatcatagctcactgcagcctcaaactcctaggctcaagtgatcctcctgccttagcctcctgagcgactgggactacaggcatgttccaccatacccggctaatttttaaatttttggtagagatgagggtctcactatgttgcccaggctggtctcaaactcctagcatcaagtgatcctcccctcttggcctcccaaagtgctgggattataggcatgagctaccatgcctggcccaattttttttaactagtccttattttttaagaatacgtactgaaatatttacagatgagatggtacgatgtctgggattacttccaagccatccagtgggaggagggtaaggatggaaccaaactggctgtaagctgataatgtggggttcatcatactattttctcgacttgtgtctatgtgtgaaatttcctatattaaagacagacacagaataggaatgtatacactaaatggcaacagtatacattttgacatcttggatttttaaaaattaaatacacgctgttcagtttttaagtaaagccctaatttgggcagattctccccttctaagggatttgaacacaaatttctgaaccctagggttggagtatgagtattgctggctccttcgtgttttttgacagggagaaaccaacagtgcacaaaatggtgactgtcaccagacactgaatctgccagcacctggatcctggacttcctagcctccagaacagtgaggaataaattcattgtgttctgcaaagctccaaggacctcctgaaatagtcctgagtccctctcagcctggtgtagcacccaattcagttgtctggctggtttgtggtgccaggccaagacaccactttgggtggggaggagaaagagaatgaagtaggaggggagggcgtgagccatgatttgggagagagaatcagacagtcagccagaaagacgcatacagtaggcacttaataaatgtttgcctggatagacaggaaccgaagtacaggcgctgaagaaaggcagtaactttttcccatggatgggagttctgctgcaaaaggacataataaaaatcgacatgataattgctgtgatctgaaagtgtgtgtcctcctccaaatttgcatgttgaaatcctaactcccaaagtgatggtatgaggaggtggggcttatttgatctggagggtggaggccgctaggaaactggctctgactgataaggccttcaggattgggatgagtgcctttataaaagagaccacagcctgtaatcccagcactttgggaggctgagatgggcggattgcttgaggtcaggagttccagaccagcctggccaacacagtgaaaccctgtctctaccaaaaaatacaaaaattagccaggtgtggtggcacgtgcctgtagtcccagctactcaggaggctgaggcaggagaatcacttgaacctgggaggcagaggttgcagtgagcagagatcagccaatgcactccagcctgggtgacagagcaagactctgcctcggaaaaaaaaaaagaaagagagagagagagatcatagagatccagctagcctgtttcataatatgaaggcacagcaggaaggcgccacccatgaggaagctgaccatcaccagatactgaatctgccagcatcttgatcttggacttcccaggctccagaaccaataaatttctgttgatagtacccagtttatggtatttttatagcagcctgaacagactaatacagtttcctacaaaaaaaccaaggattttgtaatgggaatgaatgcgaagataccaaatattcctgtgctcttctgagagtcattcttgctcaaagagcctgaagagtttccatgactcttgtctaaacttatttctaatccctgattgtttatcttttaggatttccatattatttttctactgcatttgtttgttgatttgacagtgtgaccacagcagcctagccacatgtcaaaaaggcagccacaatcataagtcaaaggaatttaagaaacagccaggcacggtggctcacgcctgtaatcctagcactttggaaggctgaggcaggtgactcacttaaggtcagctaatcgcctgaggttaggcgttggaaactagcctggccaacatggtgaacccccgtctctactaaaaatacaaaaactagccgggcgtggtggcgggtgcctgtaatcccagctactcaggaggctgaggcaggagaatcgcttgaacctaggaggcagaggtttcagtgagcccagattgtgccactgcactctaacctgggagacagagtgagactctgtctcaaaaaaaaaaaaaaaaaaaagtgaggccaggtgcggtggctcactcctataatctcagtactttgggaggccaaggcaggcagatcgctcgcaagtttgagaccaacctgggcaacacgatgaaaccccatctctataaaaaatacaaaaattagttgggcatggtggtacatctttagtcccagctacttgggagactgaggtgggaagattgcttaagcttgggaggcggaggttgtagtgagctgagattgtgccactgatctccagcctgggcaacagagccagaccttgactcaaacaccaaaaaaaaaaaaaaaaaaaaagaaagaaaatgtgacttttttttttttttttgagatgaagtctcactctgtcgcccaggctggagtgcagtggcacgatctcggctcactgcaacctctacatcccaggttcaagcgattctcctgccttagcctcctgagtagctgggattacaggcatgtgcccccacgcctggttaatttttgtttttttagtagagacggggtttcaccatgttggtcaggctggtctcgaactcctggccttgtgagatccgcctgcctcagcctcccaaattgataagattacaggcgtgaaccaccgcgcccggccaatgtgacttataagtaatcggaaaaggcattgcagacatggcaagattctgtgtaaattgctttagctgaaattagacactcaattaggcacttaattaccctgaagccttattgatgccctattagaagtggccccacccactagaatcaagtggagatgacaggtcggctccctgtagtggtgccagaagcaagactgatacagcaaccacaggcagcattcaatccacagctcccaggcctcctggcctcctgttttcctgatcacaccactcactgcacgagcattttccatctgagatcctctcaaatctgaattttaaatgtgggtttcctttcaggactgcaagcagacagtcactctgcatggccccactgtaaggatgtcaacctttagcggcagcttggaccttcaaggggtcatcagcagagccgcactgatcagctgctcggagtccagctctgactgatgaagtcagctaatggtccacgcgccccttctcattaataactcacctccatgggcagctgggtccaggtctctgcccctggtatcacattatatgataattatattcagattagtttttcatatcctttggacagagacatgctaatttgggtacttagacattaaaatcttataaagttctcgagtgattttaagtccaagttcttaaatgggatgccttattggaaagaaaacatgtagctatcagcttcctatcaagaactgactcctggccaggtgcagtggctcacatctgtaatcctaacactttgggaggctggggtgggagaatcacttgaggccaggagtttgagaccagcctaagcaacacagtgagacgctgtctctacccccgcaaaaaaaatgtaattaaaaacaaaatagtcaggcatagtggtgcctgcctgtagttccagctacttggaagaatggggcaagaggattgcttgagcctaggagttcaaggatgcaatgagctgtgattgtgccactgcactccagcctgggtgacagagcgagactctgtcccttaaaaaaatgccgattcctgggtagataggcaactgactttgatcagacgctctcctatgggtggggatgctgtctcacaacagattcagcaccatattttattttatttttttgagacggagttttactcttgttgcccaggttggagtgcagtcgcgtgatctgggctcactgcaacctctacctgccgggttcaagtgattcgcctgcctcagcctcccaagtagttggaattacaggcacaagccaccacccctggataatttttttttttttttgtatttttagtagagagtttcaccatgttggccaggctggtctcaaactcctgacctcaagtgatccacccgccgcagcctcccaaagtgctgggattatgggtgtgagccatcacgcccggcccagcatcttattttaaacggtccatcagaggaagacaaatactatatgatctcacctacatgaggaatcaagaaaagtcaaactcatagaaacagagagtaaaatggtggcttgcaggggctggggtgggagatatggggagacgccaaagggccgcaaaccttcagttacaagatgaatccattctggagaccaaccagacagcatggcaaggacagttcataataacatactgcatccctgaaatttgctaagagagtagatcctagatgttctcacgacacacacacacaaatgataaccaggttaggtgacagatcggttaactaacttagctgtggtcatcatttcacaatacagctgactcttgaacaacataggtttgaactgcatgggcccacttacacgaagattttctttattttattttattttattattttattttattttatttttcgagacggagtctctctctttggagtgccatggcacgaccttggttcactgcacctccgcctcccaggttcaagtgactctcctgcctcagcctcctgagtagctgggattacaggcgcctgccaccacactcggctaatttttgtatttttagtcgagacggggtttagccacgttggccaggctggtctcgaaccaggatcacctgacctcagatgatccacccaccccagtctcccagggtgctgggattacagctgtgaaccactgcgcccagcctacaggaagattttcttctgcctctgctacccaagctagcaagaccaacccctcttcttcctcctcctcctactcggcctactcaacatgaagacaaggatgaagacctttgtgatgaactacttccacttcatgaatagtaaatgtattttccttatgattttcttaataacatgttcttttctctagtgtacattattgtaagaatatgatatatgatacgcacacaaaatatgcattaaccatttatgtgattagtaaggcttctggtaaacagtaggctattagtagctttgtggtttctgctttttgttttgtttttgtgtttttttggagacagagtctcgctccatcagccaggctaaagtgcagtggcgcaatctcagctcactgcaacctcggcctctggagttcaagcaattctcctgcttcagcctcccaagtatctgggatcacaggtgcgcacccctgtgcccagataatttttgtatttttagtttcaccatgttggccaggctggtctccaactcctgacctcagctaatccacctgccttagcttcctaaagtgctgggattacagatgtgagccaccgcacccagcctgcttcagttaagttctgcctggtgatcattcttgtcaattctcattgcatttccctcacttaatggagaccatgtttgtgtctgtctctgtttcagtctcggtctctctttctgtctctctccctcaccctttctctccatgaattcccataggctgaagttattccaccactgaagtcttaactccagcgtccactctccaagcactgcctcctgatccccagctcccattcccacttgtgctccattcacctccatctcccctactctgccctaggaggacttcccccacctcctggctctgctctcttccctgccagacgcggacagccactagaagtccgtggtccccagccccagatgggccttcagcacaagcatcccttccactgccatcccatacgccaggggagcagactgtggctcttgagatctgtgattagtcaaaactctttcagggccagttgcagtggctcacgcctttaatcccagcactctgggaggccaagacgggtggatcacctacggtcaggagtttgagaccagcctggccaacatggtgaaaccccatctctactaaaaatacacaaattagctgggcatggtggcatgcacctgtagtcccagctacttgggaggttgaggcaggagaatcgcttgaacccgggaggcagaggttgcaatgggccaagatcgcaccattgcacttcagcctgggtgacagaatgagactccataaaaaaaaaaacaaaaaaaaaacctttttaggataaattttctcatgaaaaaaatttgtatatgtaagcttgaaagtcaactgacagtaggcagatagtagtttatgagccataaggcatctcagccccatcaataataagagtgtacttccgacaccaaaatagatatagagaccaatgtcattgggagctagaattctgcgtgtggtttgtgattaacttggtggacgaaattctcctttaaagtcgtaaagttccatgaagtctcagtctcaaggtcaggaatcttggtatcctaattttctgtagcgagctgtgggggaagcggcattctgttcctacatgcattgttctaccagcaaaaatccagtcttagcaaacacaaaatatttctttttcttccttgtttttttgagacagtcttgctctgtctctgatattacgatgtcttttcttaaaaataaaataacaaaatattcttatgctataggtttgacttttgtgcatagggtcacacctctattagcccacttaaaagaaatagaagtcgaaaaaaaaaaaaaactagaaaagaaaaaggtgaatgtggccgggcacggtggctcatgcctgtaatcccagcactttgggaggccgaggcaggcggatcacctgaggtcaggagtttgagaccttcctggccaacatggcgaaactccgtctctactaaaaatacaaaaattagccaggcatggtgtcgccctcctatcatcccagctactcgggaggctgaggcaagagaatcacttgaaccccaggaggcagaggttacagtgagctgagatcgggccactgtactccagcctgggtgacagagtgagactccgtctcaaaaaaaaaaaaaaaaaaaaagaaaagagaaagaaagaaaagaaacaggtgaatggaaactacccaacccagttctggcaggactgttaacggcccagacccttcaggaatgaaggtttgggtcacatcacaaggccagaagtcaccggctgagattcttgctgaggaccaagagagtggaaagagtagtggaagaaactatctaaacaccagcttgagccacacggctagtggaaacaaacaatcaaaagaacaacacacaacacaaaacaatttaaggcctatagttagcagagtatgttttccttgccttgaaatgaatgcatatatgatatttccctttctcattccccccgccttttttgggggcgggggtggggggacagagtttcgctctgtcacccaggctgaagtgcagtggcacgatctcagctcactgcaacctccatctcccaggttaagcaattctcgtgcctcagcctcatgattagctgggattacaggcttgcaccatcacgcccggctaatttttattttttttaatttttttttatttttaggtagagacagggttttaccatgttgaccaggctggtctcaaactgttgagctcaggtgatccattcacctcggtccaaagtgctgggattacaggcgtgagccaccatggttcccttcttatctaacataagatatactgacagtagttaaccctatatctcagcatttaagttacaggtttaagttaaggtatatgtttgggttctatgagggctagttgcattatgttaggtgaaagcatgattctgccactgttttcatttggaacttaagggtggggaaaggaggtgactatgcatgccaaggtgaccaaggggtggagtctgccagattgcaacttttcaccttggcaccagcattccagtctaaggctaggaaatccattgcctgcatggtctggccgttagggtcggccaagagctgaactcgcgtgagatttgaaagggtgaaagcgaaactgaagcccttactcttggaacgtccttttggtgggattcttcctaattttagaccccaccaaccaacagtgggctcagtccagtgcagagagcagggctgcagttccggcaaagcatggcttacgcagacctccccttcatgcaccagcttccagaatgttcccacaaactctgctctccccagccgcacctgtgtttctggctgtcatggttagttagaggctttcgacacccacattccagaactttaatttcctacattggtataaatctagtaagccgcgtgttcccataaaacataatttttttttttttgagacagagtctcgctctatcgcccaggctagagtgcaatggcgtgatctcggctcactgcaacctccgcctcccgggttcaagcgattctcctgcctcagcctcccgaggagctatgattacaggcatgcgccaccatgcctggctaattttttatttttagtagagatggagtttcgccatgttggccaggctggtctcgaactcctgacttcaggcagtccgcctgccttcaggtggttctgggattacaggcgtgagccactgcgcctggcccataaaacataattaaataataaagaggcaaaagagatgaacaaacagttcacaaaaaaggaactacagatggttcttagacaaatgaaaagatgttcaacctcatttattaccacaaagcagatgaaaatttccttcagacacatttttcatctgtcaaactggcaaaaatccataggtttcctggcaccctctgtggacaacgctgtggggaagctatcttcctacagtgcgggtggaaaagtccatgaaagagtcctacagagggtgcagttagcgacagctgtcacgtttacataagtggatgagtgacttcagcaatccaactttgcttttttattctacagatatgcataccagcacacgttaaaaggtatctatctgttcaaggatttttttttttttttgagaggggtctcactcttgcccaggctggagtgcagtggtgcaatctcagctcactgcaacctccccatcctgggttcaagtgattctcctgcctcagcctcctgagtagctgggattacaggcgtgtgccaccatgcccggctacttttttgtatttttagtagagaagtagagatggggtttcaccatgttggtcaggctggtcttgaaccctgacctcgtgatccacccacctcggcctcccaaagtgctgggattacaggtgtgagccaccgcacccagcctcaaggatatttactgcaggctttttactactgtttgcagtagtaaaaaccaagaaacaatgtaacaattgtcaaaaggtaaataaattcggctgggcatgatagcacacaattgttccagctacctgggaggccaaggtgggaggatgccttgagcctaggagctcaaggccagcctgggcaacatagcaagaccctgcctcttttttaaaaagttaaataaattggctgggcatggtagctcatgcctgtaatcccagcactttgggaggctgaggcaggggaatcacctgagctcaggagttcgagaccagcctgggcaacatggaaaaacctcgtctctactaaaaatacaaaaaattagccaggtgcggtggcaggagcctgtagtcccagctacttcagaggctgaggcacgagaatcgcttcaacccgggaggcagaggttgcagtgagctgagattgcaccattgcactccagcctgggcgacagagtgagactctgtctcaaaaaaaaaaaaagttaaataaattaagatgtgttcatatactagaatgttatgcagctgtgatgaagaatgaaagtaagaacactgttttgcattgatatggaaaggtatctaagatattgccatgtgaaaagaaaaagatgaacaactatacacagggtgtgcatttttttgtagcaaagaaagaaaaagaaaatatataatttgtgtttgttagtgtctgcatgaatcatttctaaaatgaagccaatgataagagtgggaattagcagaaacagtacatacgggtaaagatggaagagagtttctttgtatatcacttttgttttattttgtttgagacggagtctcacacggtcgcccaggctggagtgcagtggtgcgatcttggctcactgcaagctccgcctcccgggttcacgccattctcctgcctcagcctcccgagtagctgggactacaggcgcccaccaccacgcctggctaattttttgtatttttagtagagacggggtttcactgtgttagccaggatggtctcgatctcctgacctcatgatctgcctgcctcgccttccaaagtgctgggattacaggcgtgagccaccgctccggccatgttttgttttgtttttgagacagggtcttgctctgtcgcccagaatggagtgcagtggcatgatctcagctcattgcaacctcctgggttcaagtgatcttctcacttcagccgccaagtacctgggactacaggcgtaaagccaccacgcccaactaattttcctattttttgtagagatagggtttcgccatgttggtcaggctggtctcaaactcctcagctcaagccatctgcctgcctcggcctcccaaagtgctgggattacagacatgagccattgtgctcggctgtataccattttttaaatcgtgtgaatatatttctattcaaaaattaaatatgcacaaaatctaactaggtgttgatttaagaaaagcaagtcttactacaatcatattgacattcgttcaaaaagttaattgcagccaagagtggtggctcaagcctgtaatcccagcactttgagaggtgaaggtgggaggatcatttgaggccaggagttcaagaccgacctctgcaacatagcaagaccctgtctctataaaaaaatttaaaagtatctgggcatggtgacacatgcttgtagtcccagtaactctcaggaggctgaggcaggaggatcccttgagcccaggagtttgagcctgcagtgagctatgattgtgtcactgtactccagcctgggccacagtgtgagaccctgtctctaaaacataaaaaatcctttaaagaaataaataggccgggcgtggtggttcacacctgtaatcccagcactttgggaggccgaggcgggcggatcatgacgtcaggagatcgagaccatcctggctaacatggcgaaaccccatctctactaaaaatacaaaaaattagccaggcgaggtggcaggcgcctgtagtcccagctgctcgggaggctgaggcaggagaatggcgtgaagccagcgggcggagcctgcagtgagcagagatcgcacccctgcactccagccggggagacagcgagactccatctcaaaagaaaaaaataaataaataaataaataagtaattgctcacaaattcattatttttacttaaaactaatctaatatatttatatggagaagtggggtcacaattatttagctagcttcttcctctcaacctttaattttaactattttaaaccttagtcagacactcttctcctacattcaccacttactaatattttgccacatttcctttattattatctacctatttagtcacacttgcacacaagcatacacgcacttttctgggtgaaattatctgagcattagttgtagacgtcatgacactttacccctaaatactgtagcatgtagctctgaagaacaaagacacattccttacacagccacaggttactgcaatcaagaaatttaactttactattgactaattagcagtctgtatttaaatttccccaattatgccctttgtatttgtttttttcctttttattttttgttttttagtttttatttttattttattttttttagacgaagtctcactccatcacccaggctggagtgcagtggcacaatctcggctcactgcaacctccacctcccaggttcaagcaatgctcctgcctcagcctcccaagtagcttggattataggcacgcaccaccaccctggctagtttttgtatttttagtagagacggggtttcaccatgttagccacactggactcaaactcctggcctcaagtgatctgcccacctcggcctcccacagtgttgggattataggcacaagccgatgcgcccggcctatacttgttttagttttgttttgttttgttttgtttttgagacagagtctctctctatcaccaggctggagtgctgagcaatctcagctcactgcaacctccaactccgtggttcagacaattctcctatctcagcctcccgaatagctgggattacaggcacatgccaccacgccgaactaatttttgtatttttagtagagacggggtttcaccatgttggccaggattgtctcgatctcctgacctcatgatccacccacttcggcctccgaaagtgctgggattacaggtgtgagccaccatgcccagcctgttttttttctgattgacagtctggtcaatgatcacattgcctttaattgttacacctctttaggctgttttaatacacagcagttcctcaaacctctcttggtcattcttgatattgacatgtttatctgggcctgttattttcagaacgtccctaaaatctggattttccaaggtgatttctcacgaccagtcttaggttaaacatttttggcaaaggtgcttataggtaatgtgccttccaccaggatgccaaatggccccattgttggcggagaagcttgattatttggttaaggttggtatctaccaggtttcttcattgtaaaccctctttcctcttggtaattaacaagtcttttaaggtgatactttgagaccacactcgtgtcttgttccaacaacatatcactcaatggttccgcatccactgataaattttgcctatatcaattacaacaaaagtttttgcaaaaagtggttttctagttttatcatttcttctacatatattaatggccattttctttttgtgtgtgaggagtaaggggcactattattataattcaaaaatatatataaatatatattttatatgtaaatatgtataaagagtatagtaatagttataaatgtataactcaaaatgtatataaatgtaaatatatatatttatatataatatatataaattatatataaatatatatatttatgtaatatataatatattatatttatatatttatattttatatttttatatataaatatataatttatgtatatattttataattatatatttatatttaatatataatatataatttatgtatatattttataattatatatttatatttaatatataatatataatatatttatttatatatttatatttaatatataatatattattttatatttaatatataatatattatatatttaaaattatataatatataatatattatatatttaaaataatatttaatatataaatatatttatatatttatataatttatatttatattatatatattatataaatatataaatatataaattatatatttctatatatcatttatacataaattaatatataaatatataatttatatatataattatataatttatataattatataaattatataattatataaattataaatttatatatatttatatgtataaatatataaatatatataaatttatacatataaaaatataaatttatatataaatatatatataaatacaaaataaataaataaatatgtatatgtatatatttggaaacagatcttgctctgtcacccaggctgaagtgcagtggcacaatcacggctcactgcaacatccaactctggggctcaagggatcctcacacctcagtctcccaaagtgctgggattacaggtgcacaccaccatgcccagcctcaaactgttttttatttaatgtgttgtcattcattactgtcataattcctcatgctcaaagtgtcccagtgggaatgcctccaagctagctcctgtgtccctcagacatattcccatcaatcgtgaggcatgtccttgcatttagaaataagacgttgcgggctcagtgtgtacatttcttgctccagatctggaatccaccattttccatgaagccttggttccttctcgtagggaatggtacttaaagaccacagtctgggcacctggggtttttatgtcttccaggccctttttacttactcattctgataaagaactggtctttgctcttcaaacatctctcaaccatttctctaccccaccttcattttcctttcctcctcctttgggcatcaaatttttgacaaaatgttggaagctctgaagactagaaactgtgaaccttaatggtacaacatttgaaatgagacaacttcatttatttcccagcactccccacccccaagttgaaatgggttgcaaccaagctattttaaggactgcttataaagaaaggagccacaggcagtagtctcacattcagatctttttctgggaagggaggggagaagaggaggaatttcatctaatacaaatatcatttgcattttaaaagtctatgtctaattgctacttacagctatagtaaaaattgatttaatacactctaattgtatggtttgaatatgtaatcagaaatgcaaagcttgatgtcttcgattttaattttcataactaaaacctctccgttcacatatttcagtagtttctgggctgaaacacattttctaattaatgatcaagatgtgtgcaatagttcaagaccttttcaggatttggaccaccctgaataatgcattttattccacatcataattatgcttgtccctttattgaactggtcattaccttggccatagggagatatcccccagagagtcagttcgtgaattattaagtggcctaagatttgcatcatcctgacaggttaaagggccaaatttacttgactatcaaacagttttagaagattaaaaaaaattacagtttgcaacaactggagctgtactcccatgttttaataaaagctctttcctcaagaacacagtctcagaacagcacaaaagtcactgcatgactctgtaagacgaaggacaagccagtaggtacctgacctgtgaaatccaaactctggccacctcaacactttcctgttcaagatcagccttggtcaacactgtatgtcaaagtacataaggtgtatcagcagccaccaaaactcaaagcaaatggttcaaccaaaaatgggaaccttctggttaactgagaagcctataggcgactctaacttaaactgcttacgtggttttaaaaaataataataatgatatttgcaaatccaagaaaaaatattgtatggttttaattgaacaaaacaaactcaaagaaccttatacggttaaataacacattcggtgcacctatataaatgatcaacttttggggggtaaataatttttgacattactatcaccatgagaatagagatattgtcagaaaaaaaagttaatgatcttgaaatggccccaaagagttttgaatgtcctgtgtagtgaaccattcaagtcacctgcactttttcttacctttgagttattttataactttataaattgttggaaactggtagtaatgaaaatgattccttgctatagatctgcaaaggaattttgtttggtggaatgtaactgattatggccctgtggatattcaccatttttgcacttatttcagtattcctggaaaaaaacaaaaaaacaaaaaaacctctttatgtgcttttttaagtattcaaggagcaactccttcccttcaggcaaaaggtaacctgcttcaagccagctctgtaaacctccgtctgccccagtccagaagctccttatcctgaagtgttcttacagctctcagctctgttatgttccttggttcacaacactttttgattctttccatatatttccttatgttttgctgttactttagtctccccaagtcaattacgaaagtccatccaccaacaaagaagtacttcacattgtcttcaatactcctatggcattctttgaaaataaactctcttgttgctgttgtgatcattgttaggggtatgaaatacagaaagtttgtgtttgcatttttcatataccttccatcaaatcaagagttatcctccacccccaaggtcagctatggttactatgaaaatcatcatcgtttaatttatttcagctcctcttcacccacatgacccccaattctgactgccacaaggattctgtaggaaagcaccacgacaccctagagaagcagagaaaacaacagatgtggatatagaacatttgaaaaatataaactgatatctctgtcaatttctgtactttttcaacagaaaaaaagacacaatcttttcgaatgttcacggtatatttacaaaggtcatcatatcctgagctacaaaatttaaaaaaaaacctaaattaatgtccaaaataacaaaatgaggtgggaggcaggactccactccagaggtggggctcagacgcaggaccagactgaggacaaagtaaaacagggaagaggtgaaagcacctctccgtaagacacgcccaccagtgtgccatgtcagtttaccattgccatggcaacgcccagaatttaccatgcctttctatggcaacaacccagaagtgccacactttttctagaaaattctgaatgacctgccccttaatttgcatgtaattaaaagtaggcgtaaatatgactgccaaactgcccctgagctgccacctccatgcactgcctagcaggcagcactgctctgctaaccgtcatgaagcactaacactaccgcctcagtaaagctgtttcttccacccctgactcactcttgaattctttcctgagggcagccacgaaccttcccacgataagctccagctttggggctctcctgccccacatagaaagcacatacccttaccagcacggaaacaaaatagcaaagtgatccagtaagccccccaaaattgaataccttgtaaactgaaaatcactctcttggtcaaactagaaatcaacaaaaatcaccacctataaatagatgacagcaagagtgatacatgtcaaatgtcagaaaaaaaatagctgtctagactgaaaaataaagccacaatattgtatagctccacccattgaaaggtagagttttttgttgttgttttgagatggagtctcgctgtgtcgcccaggctggagtgcagtggtacaatctcggcatgagtcacggtgcctggcctgaaaggtagaattttttactcagccctcgaacctgggctatcccctgacttgctctggccaacagaacctgtgggagtgacagtgcatgaattcctgagcctaacagtctctgttttgttttgttttctttcattttttgagatggagtctcactctgtcgcccaggctggagtgcagtggcgcgatctcggctcaccgcaacctccacctctcaggttcaagtgattctcctgcctcagcctcccgagtagctgggattacaggcacccaccaccattcccggctcatttttgtatttttagtagagacagggtttcaccacattggccaggctggtctcgaactcccgatcttaggtgatccacccacctcggcctcccaaagtgctgagattacaggcatgagccaccatgcccagtcaacagtctgtttttgttctctgggaatgttgtcctggcactgccacttaaggaagccagtctaacccactgaggatgagcggccaggtgaagaagaacacggggccagcacgcactgcaggacacgagtgaggcccttggactttccagcccagctggcccagcagccaaataccacgcatcaatgaccccaggtaagcagaggaaccacgcagccaacccaaaatattatcagacataaactgttgacagattaagccatacgttttagggtggtttgtcatgcagcattagttaacaaacaataactttaattgttttcattattaatcatgacttttttttttctgagacggagtttcactctgtcgcccaggctggggggcagtggcacgatctcgggtcattgccacttccacctcctgggttcaagcgattcttctgcctcagcctcccgagtagctgggactacaggcacctgccaccgggcctggctaatttttgtatttttagttagagacagggtttcaccatcttggtcaggctggtctggtcttgaactcctgacctcgtgatctgcccgtctcagcctcccaaagtgctgggattacaggcgtgagccatcatgcccagccaatcatgacatttttaacacatcacacacgcgcgcgcgcacacacacacacacacgcacgcacacacattgtagaggacatctgctgttttggcccacccaggatccaggtccctttcctctggtcacaggtcctctctggaggactgtgggtctccaggagttgggtgagactcaggtgaagtcaatcgtgatgttaagttttgaagagaaggcaagggttaaagaaagaggagaaagagagagaggtggctctacaacaatgcaggttttatgtccagaacaagatctgtggaggtgggggaccagcttaatgccagagcccactgccagttacagtctggggtaatttacaagtctggccagggagaagggggatctggacattatggcttgctgcccaggaggatattgataaattgttgctgtgatcaggtggtttggccctttttctggtgggatgttttccacgcccgtcctggaaaacgaattgttttaatgccatttaaattaggatcaaagaggccaggcacggtggctcacgcctgtaatcccagcactttgggaggccgaggtgggtggatcacgaggtcaggagatggagaccatcctggctaatatggtgaaaccctgtctctactaaaaatacaaaaaattagccaggcgtggtggcaggcacctgtagtcccagctactcgggaggctgaggcaggagaatggtgtgaacccgagaggtggagcttgcactgagcagagatcacgccactgcactccagcctgggagacagagcgagactccatctcaaaaaaaaaaaaaaaaattataatcaaagataatctgtaggccagatgcagtggctcatgcctataatcccagtagtttgggaggccaaggcaggaggatcatttgaggccaggagttcaaaactagcctgggcaacatagtgagaccccgtctctacaaaaaatgaaaaaattagctgggtgtggtgatgcacacctgtagtcccagctacttaggaagctgagttgggaggattgcttgagcccaggagttcagaggctgcagtgagctgtgattgcaccactgcactccagcctgggagaagagcaagaccctgcctctatacagaaatttaattagataaacttacaactaaatatattaaaaacaaacataaacataagaaatactcagatcttcttttccccatatccaccatattttgactttgaggttacttgcagctattgtgtctgtacggtagaaacactataaaatggtgccatctcttcctagatccacattaggtgacttcatgttgtagctgaaaatctgccttggtgggagttttggaaattgataaacgctacaatcaggcttgaaaatatttttttaattgcatagatctctgtaatcatagcattttgggaggcagaggcgggcggattgtctgagctcaggagtttgagaccagccgggcaacatggtgaaacccgtctctactaaaatataaaatattagctggatatggcggcgcacgcctgtagtcccagcttccggaggctgaggcaggagaattgcttgaacctgggaggtggaggttgcagtgagctgagattgggccactgcactccagcctgggtgacagagcgagacttcgtccccccacctaaaaaaaaaaaaaattgcttggatctaagaaagcggtgggaaaaactgttaatgccaattaaacttaaaagtgaacagtatttatagctgttacattatgcatagcacagacaactgagaaaatagtcttctgatattcaaaaattattatctgattcagcaaagaagttgcttatgtcattgacaaacaagtgatgtaccgacatatgtcttatttcactttcatcttactccttaaatagaaatagcaatcagcatttatgtcagaagtatactaattgattgcaatcattggttggctgtagatataggacttcaacaaaaatcaacgtaaaccttttgttataaccaactggctatatgaaatttacaataaagaataccgtataccatatattttattactatttataagttatataatggattcttttttttttttttttttgagacggagtttcactcttgttgctcaggctagagtgcaatggcgtggtctctgctcactgcaacctccgcctcccgggttcaagcgattctcctgcctcagcctcccaagtagctgggattacaggcgtgagccactatgcccggcctaatgcattctttagcatcagtaaaatttataaaatgttgatatattaaataatacttctctacccaggtccagaaaaaaaggtaaaagccaaaaataattagataaataaatgttaaatatacaacattttttccagtctcctgataaatatttaccagcatccagcatactaagtgggcacaaggcaaccttttgggtgatggaaatgatctgtatattgactggactgatggtttcatggtatatacatttgttaaaattcattgaactatgcatttaaaatgtatgcattttattatatgtaaattatacctcagtaaatttgatttttttaaaaaacataaaattggccaggtgcggtggctcacgcctgtaatcctagcactttgggaggccgaggcgggtggatcacaaggtcagcagttcgagatcggcctgaccaacatactgaaaccgcctctctactaaaaacacaaaaattagccaggcgtgggggcaggcgcttgtaaccccagctactcaggaggctgaggcaggagaatctcttgaactcgggaggcggaggttgcagtggccaagatcacaccactgcactccagcctgggcgacaaagcaagactctgtctcaaaaaacaagaacaaaaacaaaaaaacaaacacgagaaaacgacaaccaaaaaaacataaaagtagggtcaaaggataagatgatgaagactccaattccacagtactttaaaaattatttggggtccaggcatgtggctcacgcctgtaaccccagcactttgggaggctgaggcgggcagatcgcttgagtttaagagtttcaagaccagcctggacaacatggtgaaaccccatgttgaaaccccatgtctaccaaaagtacaaaaattagccgggcacggtctcacgagcctgtaatcccagctactcaggaggctgaggcagaagaatcacttgaacctgggaggcagaggttgcagtgaaccaagatcgtgccactgcactccagcctgggcgacccagcgggactctgactcaaaaaaaaaggcggagggtgggggattacagtattttgtttgtttgtgtatttattttgaacttcatttaagcctagagaaggcaaaagtcacagacgcctccccgacaacccgccagctccacagccgacgcatggctgaagctctgggccctcagtcctggcaccagcatgcctctgtctctcatcttctgcagatacccaggagagctttcctctgttaaaataacagctgagattaatagcttttgcagtaattattggtgacagtaaaggaaatgtgtgatttgcactttttttttttttttggagacaggatctcactgtgtcacctaggcaagagtgcagtgacgcaaccatggctcactgcagcctcgacctcccagcgctcaagggatcctcctgcctcagcctcccaagtagctgagattacaggtgtgcaccaccatgcccagataatttttgtattttatttattttgtagagacagggtcttgcactgtcacccaggctggaatgtagtggcgcaaccactgctcactgcagctttgacctccccaagctcaagccatcttcccacctcagcccctccgaatagctgggattgactacaggcatgcaccaccatgcctggctaatttttgtattttttatttacttagttttttctgtagagacagtggtcccactatgttgcccaggctggtcttgaactcctgggctcaagcgatcctcctacctcatcctcccaaagtgctgggaccacaggcatgagccatcgcacctggcctgaatttgtgcttttaaaagcctctctaagtatttggtgaattttccacagagatgtccttctgcccttagctcttctgtgcaggaggtgaacaggaatgagcccattcactctggaggcatgtctttgccactgtctgagaacaaaagccaagtctgaaagttaaagtcacaaatatagagggaaagtcacatatctggacattgtgtcttaatgaagatcagcattcagggagcacttggaaacattaaaacctttattttttcatccagatatgttacaatatgttataatatgttacaatcacatcattctctttatatatgtacacgtctgtatatgatatatatgtcataatcatattgacctatatgatatatatcatatatacacgctttcatagcaagacaaatgcttaaggacaaattggttttacttatttttgtgaattaaaatcctaccactagacttgcctttagcaccctaagccaagtggcttatcagttatcagttaacaccagttaccaatcagcaggcacttatggagtagtgactacgtgtttataacgcccgcctttctgtaaagatgggcatttattgctttgtgtttctttaattgatgtaattaatcccggctcattgtttccaacctattcctcttcttggcccagctgaggaagtattaagttggtacaaaacc
